United States Patent Application Publication US 2022/0211063 A1 - sequence listing, part 53

SEQ ID NO: 153 - DNA, 4395481 bp, Penicillium roqueforti (residues 2,930,323-4,395,481 of 4,395,481)
  misc_feature (85051)..(85355): n is a, c, g, or t
  misc_feature (96931)..(97054): n is a, c, g, or t
  misc_feature (167476)..(168900): n is a, c, g, or t
  misc_feature (174646)..(174786): n is a, c, g, or t
  misc_feature (186876)..(192766): n is a, c, g, or t
  misc_feature (360737)..(360928): n is a, c, g, or t
  misc_feature (391873)..(392032): n is a, c, g, or t
  misc_feature (496632)..(496820): n is a, c, g, or t
  misc_feature (596164)..(596393): n is a, c, g, or t
  misc_feature (682707)..(683337): n is a, c, g, or t
  misc_feature (718997)..(719085): n is a, c, g, or t
  misc_feature (843383)..(843552): n is a, c, g, or t
  misc_feature (1092662)..(1092833): n is a, c, g, or t
  misc_feature (1157494)..(1162593): n is a, c, g, or t
  misc_feature (1192529)..(1192706): n is a, c, g, or t
  misc_feature (1228208)..(1228319): n is a, c, g, or t
  misc_feature (1338736)..(1338891): n is a, c, g, or t
  misc_feature (1570125)..(1570326): n is a, c, g, or t
  misc_feature (1572374)..(1573011): n is a, c, g, or t
  misc_feature (1778870)..(1779017): n is a, c, g, or t
  misc_feature (2068372)..(2068449): n is a, c, g, or t
  misc_feature (2226844)..(2227063): n is a, c, g, or t
  misc_feature (2309559)..(2309714): n is a, c, g, or t
  misc_feature (2399228)..(2399407): n is a, c, g, or t
  misc_feature (2468061)..(2468277): n is a, c, g, or t
  misc_feature (2498600)..(2498659): n is a, c, g, or t
  misc_feature (2576485)..(2576740): n is a, c, g, or t
  misc_feature (2701275)..(2701495): n is a, c, g, or t
  misc_feature (2766375)..(2766490): n is a, c, g, or t
  misc_feature (2901256)..(2901520): n is a, c, g, or t
  misc_feature (2994258)..(2994403): n is a, c, g, or t
  misc_feature (3046124)..(3046244): n is a, c, g, or t
  misc_feature (3064270)..(3064600): n is a, c, g, or t
  misc_feature (3131055)..(3131213): n is a, c, g, or t
  misc_feature (3154989)..(3155736): n is a, c, g, or t
  misc_feature (3156691)..(3157002): n is a, c, g, or t
  misc_feature (3186953)..(3187613): n is a, c, g, or t
  misc_feature (3198500)..(3198771): n is a, c, g, or t
  misc_feature (3203205)..(3205179): n is a, c, g, or t
  misc_feature (3205906)..(3206218): n is a, c, g, or t
  misc_feature (3207664)..(3207822): n is a, c, g, or t
  misc_feature (3257357)..(3260954): n is a, c, g, or t
  misc_feature (3261760)..(3386759): n is a, c, g, or t
  misc_feature (3388221)..(3394651): n is a, c, g, or t
  misc_feature (3513925)..(3514255): n is a, c, g, or t
  misc_feature (3520773)..(3521165): n is a, c, g, or t
  misc_feature (3528586)..(3531140): n is a, c, g, or t
  misc_feature (3533531)..(3533642): n is a, c, g, or t
  misc_feature (3544018)..(3544205): n is a, c, g, or t
  misc_feature (3640869)..(3641060): n is a, c, g, or t
  misc_feature (3768087)..(3769809): n is a, c, g, or t
  misc_feature (3862432)..(3862766): n is a, c, g, or t
  misc_feature (3867803)..(3868440): n is a, c, g, or t
  misc_feature (3874002)..(3874693): n is a, c, g, or t
  misc_feature (3907382)..(3907609): n is a, c, g, or t
  misc_feature (4023516)..(4023672): n is a, c, g, or t
  misc_feature (4214586)..(4214731): n is a, c, g, or t
  misc_feature (4215818)..(4216330): n is a, c, g, or t
  misc_feature (4384523)..(4386942): n is a, c, g, or t
  misc_feature (4389367)..(4392880): n is a, c, g, or t
  misc_feature (4395479)..(4395479): n is a, c, g, or t
tatcagaccagtgacccagctggcaacgaacactaagaaataccaactgctggggacttcatcgtagtcaagcatcagcttataatgagggtcaattaaagggtcccgacgaatttgttccttctcctcctcggttcggacaccagtgtgctgccaaaacttataaaaggaaggatccaaaatcttcttcaagttgctccatgtcatccaagcccatccaaggctgacttcagcgtagttccagagcaacatgtgaacaatagtggccgtgagcccagcgttggatgtgatgagatagttcacgtacgtggcggtaaggtaaggagctccagcctgatccaccagggtgctgttcacggtgaagtctgcgttcatgattgcagtctcgttgtatgggacagcagtggtcgtgtttgagctctgatcgtagagaagctgagacatgaaagggaaatccttggctctccagatatttccgtagtaaagtgccatggagaggatgatacccccgatataaccaatgaaactgttggccaaagtttgaagcggcatccaaagtggggatccgaaaccggcgatataattccagtcaaagcagacggacaggaatcccatgccctcattaccctgggagcctccgaacagatttgtgaagatcagattgtgttggtcggccaagcagaaaatggaaaccgcggacaaaagtgggaagatgtactagatattgtcagagcctgtaaggtagatcgatgtggttgagcaaacgtacctcggggaaccattcccagcaaaagatagccgcgaatacgatccagaataccttgaatctctgcttggtctccgctttgggcttgtgcaaggtctccatgacagtcgtgatgggtaggttgatgggatacagcattgaggtggggtgtaccaaaacattgcgcatcatgcctgcaacgccatacccaatgagctgcgaagaaagcgtaatgaagattcccgcagctacattaggatatcctccataatagagcttttgcacagccaaagcttccgtagacaaggccgagacagctgccgccgaggacatgaggactgctgcggtgtgttccttccggttccacgggaaagggttgagaaaacggccgatgacaccccgtcgtgggataaaggtagacatagccgtacccagagtttgagcaaggacagtcaagaacatgaccgagacgtaaacaacctggggcttgaagtacatgatctcttgcaggaccgctccgaacgcggacaatccgagacctgattcgagtcagcgacatgctagattaccacagaggacacaatgaaaaggctcaccaatgaagaacatgcggaacgtccatggattgagtgttgggtcatcgtcaacatgaatgacctgagtgacgatctcctccgcagtttgaaggggagctgcagtccccttcgagagagcttcggcgtcgtcataaatcggaagaggcacttcgtgaatagaagggacctggtccttttccccgcccttttccccaaacttttcgctgttcacctccgcagagggtacgcgctcaaccagggtgtctgttttagttggcgtcgtcgccatgtcgaataacaagtgatgtgatgtctcaggaggcaggactcagaagtgagagatgttcaaaaggtcaagaaattgccaggtcgggtctgctgatatatcatcgataagaggagcgcaagaagtggcattcccctcccctcccctccccctggactactagcgctcgagcccaaggttcaagaaacccagctcatagcacgataaggactaatcccagcctgtgatcgaacgtaacaaccacttgtcctaaaacagaaggtggccacaggccttagattggcgcgcccacctggattcggtattaccgacggggcgccgtcgagcaggattccaatgcacgaaccagatacaccgctgcgacgataaagatgcaggtctcacctcgtagtggcgtgccatccatcccttgtattggataaggaataagtcactaaaacgcttatacgtaatgtggatgccacgctaagctatctccaatcccacccccggaagcattgtacaatccgagacgcttctccgacggagtccgcgcgctgtcccgaactcgaccaaaggggctatctgagtttcgtcgccataacccgctcaggaacaggcgagtgttgtaatatgttgtagagaaataaactagggaagggccattgtttcaattgacaaagagtcaaaaacattggtgttattactggtataccgaagttataccagtctggacggtcaggctaagctttttcccgtataaatgctatttcgcttaagctaatccaagccttcgcaagcttttccccaagctttctcgctcaaagtggaacttcaagtccgtggaggggccatgttacatttggtggcggagatatcttaattatgaggtctaatcctgtcgccattcacccgatgtatcatttcatttcatatcactccaatcagaccggacaaatcaatcaagatgttgttagccgtcgggtgacttactcttttaagactgaacttgaagacgggaatcttcgaattcggtcttacctcaggctcttacgagttgattcccaagtgataaatgtgcaatcaagtcgcaccaggtgctgactaacatgacacgtgattgactggccctccctcacctcttgagaaaacaatgcgctccttgtccgacagcaattgtcctggtgaggacgacctaaccgcagcgatggatttgactcaacaatttcagcctcaacacacgcataaatgagaatcattgttgcgacttgaaaattacgagagatggaatctgctttgactgaccagctcactgagtcctgcgcccggactactcagtgagccttcctctgaacgcccccattaaagccaagacacaatccgggggaggaaaactataactatcgagcgcggaatactgcgagcgagatttatcatcaagttgaaccatttcaggtattctgagatggatgattaatctcaccatgcacgatttgaaatcaatctgacacccatacctaccattaggtatcgtaagattccgcgatcacccaacatctataaatattgcgaatatcaaacgccataacgcctccacctgggagcttcttgacatccaacatttacattctgttcatagctctaaatatcatattcaacccaataattactccattcatatctaaacatcaacatggcaaacatcaaggttgctcttgccggagtatgtcagcaaacgaccctcatactatcccattctctaacatgatccaggccagcggaaacctcggtcccgccgtactcaaggaactgctcgccgcaggctttgacgtgacagtcctcacccgacaaggcagcgataaaaccttcgattcccgcgcgcacgtcgcacaagtggactacgagtccctcgactccctcaaggccgctctgtctggacaagaagccgtagtcagcactctacatgtcggcgcagttccgatatccactcatctgcgcttgattgatgtagcagtagcagctggtgtcaagcggttcatcccgtcggaatacggctgcgacaccacgaatcccctcacgtccaaattgcctgtctacggcgataaggtcgtcatccaggaacatctcaagaatgtcgctaaggaatctggcctcagctactcgttcctcattactggtcttttccttgactggggtcttgagaagggtcttatagtcaattttgctggcccggcgacgctgtatgatggcggtgatcgccgttttagtgcgacgactctcgctggtattggcaagggagttgttgggatcatcaacaaccttgacgctactaagaactccacggtctatatcaatgaggctagggtcacgcagaatgagctcctggaattgtctggaaagagccttgagacgaaggttgttcagactgcagatctggaacagcaggcttttgcggaactggctaaaccggcccccaaccggacaatctttgctacgaatttgattctgcgggctgtctttggtgaaggatacggcggtcttttcgaccctgagaaggtctcgaatgagttgtttggtctgaagattttgtccaaggaggaactccgcggcctgatccccaagtaatcgttcttttcgataatagtctcagatgttccgttgtatacgtcgagtgcgtatatcaatccaattaatcaatcaatcttattcctcttccgtaccttatttagacagggtaccaatcacctaaatatgtgcaccgcgtaataatatattcaaactcgagtcaaagaaataaacacgaagccaatatagacaaagtaaacaaagccaataattcacagtaaagtatcaagcccacttattgagccgaacactgtccaccgaccacacagagaacaggcagatcagcaacactattcccaacccagagcttaatgccgcgtccattgacaggagccttccaatcctgcaccacaacatcccaaacactaacgtccttccgggtaatatccagcgtaaccgtctcactctgaccaggcgcaagctcccttgtcttttcaaactgccggagctgcaaggccggcgtctccagtcccagactagacggaagctcaacatacagctgggcgaccgccttaccggttcgcttacctgtattctggacctccaactggaccgtaaatacagtctcgaagagagcgggattccccccctcgccacccccggcccgggggactgcatgcggctcggtgctgtagccgtccgggtaggggtatgtattcgtggcagtgatcgactgcgggttggaaaggtaggggtaaaggtagcgccagatgcgggtgaagctggtagacgaccaggcgacttctgacgcgtccggaatgctggtgttgtaggacagggttggcggctttgtgggtcgtggagctgggtaggctgagtctagcggggtttttgttgacagcgaaggctgggaaaagttgaaggtggtgtaggagagaccgtggccgaatgcgtaccgaggtgtgatattggctttaatgaagtggcggtagtcgatgtataacccctcggtataggtatcctggatctggccgaatggttggctgatcaatcccacgctatccgggtaattatcttcgctgcgaggaatggtgtatggcatgtggccgcttggactatagtcgccaaataggatatcggtaagggagttgccagcttcttgtccagggagatgtgccacgatcactgctttcacggacttgagttcaatccactcttccatcaggatgggcccgacggtgtgaacaatcacgactacattggaaaacttctctgctgctgctttgacgagatcgtcgccatcgtgccaagcattgagtccagcttcggttcgatctcccgggttcccttcgactgtgatatagttttcgcctgaatcggcactgatgaagacgagagcgatatcgttggcattggcggtaacgtctgaggggaagttgtcggtgatgtggaactcggcattcttggtgatattagagattgcctcttgcggtgtgatcagatagggtagcctggctgtgccactgccccagcccatggtcagcacgcctttgttgcacccttggtcggcgcatgagttgagaccgtctggatttccacctgcgtctgtgccgaataccttgagagaatcattgctacgcagaggaaggatgtccatatcgttcttcagcaaggtaattgcttcccgtgcgacggctctcacggtgatgttgtgatttcctctcacatcgacaaactggttaacgacaccagatggagaaaataaagcaccggggtaaagcaagccctccttatcctgggtgttggtcgagaagtttggcaagggatagtccttatcctgtccgtgtttgtaccaagtagcaacgatacgttgaacctagacccgtatattagacatgaaagatttcacatagaggaccacgtaccatatcgttgagacggtcgacgggaacactgccattcaaaactgaacgcgacagctcaggaccccagtatgaatctccgaacaaaggaactgctccatcgccaggcatggacatatccaaaccagctatggccgacgcaacgccagagtaatgacccagccagtccgtcatcacaaatccttggaagccaagctcatccttgagaatcccattgaccaacttgctgttctgagagcacgaagagctattgacctatcagatgtcagcaacacacacaaaataaggactgaagcgactcacatcggaataagctgtcatcaaggacccaacacccgcacgaacaccctcggcaaaaggccagaggtacagttcatgcaatgtgcgatcatcaatattagacgaatagccctgggtaataacacttcccatgcgatgcatttcctgctcattaccaatgtaatgcttgatagccgcgatagcaccggtactctgcataccctttatagtctgggcacctccaaaagcctgcagaacaggatcagcaccgaagccttcccagttccgtccaccgcgtggcttgcgtcccagtgctcccacggatggtccgaggagcacattgacccccttaccgcgagcctcctcgccgagcccaacacctctctcatacatgagctctttgttaaaggtcgcgccaaccgtgataccaggcgggaaggcagtattgtggtccgagttgcggactcccagagggctgtcttggaggcacaagttgggcacacccaggcgaggcacgctgcctgtctgccctacgcagggccccatgaagaagccagtgcctgtagtcagattgactttctcggccagcgtcatattactgacgagaatatgcgccttggagtaggcttcactccagtcggagatccagcctcctggaggtgtgggatagtatgcaggtgattcatagccttctgctgctctctcgtgtaggtgggtagtagattcgaattcttctggtactggggaagctaggagaagcggggtcaaaagagagactagagttagatgcacccaaggagccatggcgatggattcgctatgaacaaaaagaatgtaagaaaagatcgtatattggccagtcaagagaacgagtgcatttttttccaggttcgaatccggggattccaaacagacaggatcgccaggggctataagagaactacagacggaggaactacgtgggaaggagcaacgcccgcgtgcatgtctcggggaaatgtatgttcacgcgtggacgcgtggatgatctttgctggattcgaggaggatcgtcatgggaacccgttgatattgcacttggcagtgcactgaatactaagaacttgtcacgatttttcaaggatcgactcgtgactagtctactagtgaattcactcccatgggcgagggctgcctgacaagaaacccgaatgctgataggctgcatagtgtcaggggttcagcaattaaatatgcaaaccagcacccccttttcttcaacaattcactgtccaagttcattcagtcaatagttcatcgagatattccaatgttactgtagatagaacacgcggcactggcccgcttgatcgccattgaaatgataattgctcaatttcattcgttgttatacatgtccacgtctttagatcttggtgtagcgcaagtaaggcttgacctcgcgaacttcaccaaacttcttcttggcatctgcggtactcacagaaggaggcacgatgacatcatcaccaacgttccagtcgatcggggtagttacacccttcttatcaccggtctgcagggagtcgatgactcgcaagacctcagcggagtttcggccggtggaggcggggtacatcatggtcaggcggatcttcttgctcgggtcgataatgaacacggagcgaatagtaaacgcaacttctttttgcccgatgctatcctcgtcgatcatgtcgtacaagaaggcaactttgcgctcggcatcggcgatgattgggaacttgacttgagtcgagccgacttcgttaatgtccttgacccactggtcgtgggaaccgagctcgttggcactctggagagagtgggcgcatcagctaaggctctgtggaagttataaatggcactcaccaatccaatcatcttgacaccacgtgcgtcgaactcatgctgaagccgggcgaaggcgcctaattcggtggtacacacctaatttcgtgttagttcagtgtcttcgtggagcatgttggtgagaaatacgggcgtgaagtctgcagggtgtgaaaagaggatggtccacttatcaccgatgaactcatggaagtcaatctcgccctgagtagtcaatgccttgaagtttggggctgtcttgtgttagcatggtatattggcaatgcaatcctgttgaaactgtaccaattgagcccaagcgcagatgcggctgttccaccttagccgagtagaggcggctgaaagcgggcgcacgaggcacctgcgcagaccacgaagcccgtggagcagcgccgagggcacggaacatctgagagccaattcttgaagccatgattgttaagagtgaaaggtgcaatcttccaaaatccagagttgacgttgactactcggggacttcagaaacccctgggccccgggaacccggtcgacgtcatcaaatctgactaagcggccacttccgcggtgctgcaacgacgtatcacttccaaggttggtttgtcttcacgccagatatatatctcatctttctagtactgaatctgaatattccttgtattccttcaaatatctcgtatattgtaccatctaaagtacggaaattgcacaatcaagatttatacaaatcctacaagatccatttatagaacgccctatccatatatccgagacatgaagtactatatatactatcagacattccgatgtacggcgtgggaaatttgacgccatccacgggttaaactggagtcaatgattggaccaattagagccccaaatccgagacccttaatcgacacttggtcgatgtccacaatgaagtcagccaatgccgcccgtttaatagcttgaatgattcctacgagatgaaaataatgtatatttgactaaaaaaggagagtcgctatacaaagtatcatatggaacccttgctatcccttacgtatgtatatacactgatttacctgatatataatgcataaggaagcttcacaagtcgagaccaagcttttgtgggccctcgaaggatctttctaacaaagagacggcgtttccctgaaagttggcagatccctttttgaaagtcttatctttgttcttttctcccgaaaggtttcgccaccatcgatatgggacggcttcactacctactcggtttgctgctattgttcatttgttcatttttctggatcgcatcgaatctgggaaaacaaccattaagcattgctcttactcatacacctcgtgaatcttgcgtctgtagcgaagacaatgttactgtcgcctcagatgtcggtatcataccgtcaaatccaccggaacctcctattaataaagatatgaggccaatatcagaaccacaaataccaagctacctgccaatcgcgaatccccatggtcactacgcacagtcctcaatcccattaaagctctggcaaaaggccggttcaacgaaaatccacgacgaccgccagagagatatcaacagttggctagatgtgaacccacgtctacgacatgagattctcacagacgacagtgcagacgagtacgttcgtgagcattttgccaactacccagaggtccttgatctctatctctcacttccggtcccaatcctaaaagccgatctccttcgtcaattgatcttgtacgccgacggaggaatttggagcgatcttgacgtgacatgtcacataccaatttatacttggatcccggaacaatttcaaaacaaaacaaacgtcgtcgtcggtttggaattcgacgggttccagttcgcgagttggacgatcatgacaaaacctaagacaagccatatcgtggcggtcatgaaatatatcatcgatagactgaaggcatctgctgcgcagtacaatgtgaccactgcacaacttaacatgacgatgatcagcgatgtggtggaagttacgggtccccaggccatgactattgctctattgcagaatctggagaaggaaatgggcgttcctttcggccgggcaaatataaccaacatcaaagaacccaccctatttcaggacgtactcgtgttgcctaatgcggccttttcctctagacaggctggcttcccggcggacagagggccttatctcgttgaacaccattacgctggctcttggaagaatgtcaatggtggcgaggcgaaatcttgacatattgggaattttgtattggcgttgcaccgcacgaaatatatgtggcaggacggacatagaatcatgataaacataatctaattttgcattcagcgcttgatcaaatttcgaggaaatgactgttgatagaagaataagtttatgtagtttgcttctatcgtgccgtgtaattttatgctgaatctgctgtctgctgcttgataaatcgaccggccaccatataaaccgccgagggaagaacacagcccggtaaacaagatcgagcatcaattggtttctattttactcactcttccctcacttgatccttactattttctcagttattcctcactctcctctcaccttcctttcgggttgaatataacagccaagcgctagccgaccttcccacggatatcccgcctttccaccagtctacaacccaccccaatcaatctatacgtcatctacagtgccgacccctatgatagcactgattgtggatctactgcctagggcgtatcaaaaccgatatgggcgttgctggcgggggagcaccaaaatctctcgaagtcgtgaccatctcatttacccctgactgattggacgtgatcgtcatcctaaaatcactccctccaagctcaagtacatggtgcacgtcccgttctgtcttggtacgatgaaacaatcttcctcacattctccgtggcagccagactcacctggtataccaaagcatagccgtcgcttgattctcaaacggagcgacacagagtccttcctagcacagatgcctacacggtggttacgggcccgtaataatggtgagtataattggtaccaagtcactgcggtcgcaagggagtttgacgaaagtcagcgctgatccgtgctcgttggtccttggccaagaaatatggggttcggaagggaaatcgtggtcaactggacaagcaagccactgtcattgcgcaggtggcgactgacaatagggcgtgagagtcgaagctggtcaagctcgagacagagaccgagactatgtggcccacacagctgactagcttcagtctcttcacgacgctgccaccgcgctcagcaacgaaaacgcggacctccgccagcagatccaggtgacccaaccgtgtgagggtgtggttcggagacgaacaaggcattcagggccgttttcaacagtcagtgagacagactattggagcggtcctggaggcccagtctatcggcgtaagtcttggtgatttcaaagcttctggtcttgcttacaataaagtcccgggctgcgtctgcatcacaactaacccgattagtctccctagactcaaagctataggatagttgaaagttcaatccagaggagcaagcacccactccaagccatccagaaatacccatagaacagggagacacagctgaagcggtaatgcaattggttgaggatcccttgaccactcaatatgtctttggtacagacatagcgtcaagtgattcggacaatgaaggagtaccaagttcctttcttgatgaccaggaggtaggtctctattatcgagtttaaaatgagcatgtctaacgaaagaatatatcggagatagatcagacgttatgggatatcgttgaaaaccttctagagagcctaccctagaatcactgagaatcctacacgaggaagcactccttacgagagaggcacaactccgggtgacttgccatgcaactcaccgagacgccatgatacacactgaagcacgctagtcgtggcatacgttctaagccatatctataagtttggtgttgcttgttctataattgagatgctaactggatggcccacatagtattcgctcaatcaacttaccagcctctacattggaaacgttatgcgtgaatgtcaccgagaacccacaaggtctcagtggaggagctagtcaggggagtgccattttcagagccctctctcgttgtcgaggtttcttgaacagcctttgaagagaacacaagagccattggactttctacctcgatacttttctatcaactgcttatttcagtatcaactttgctaccctatctatcaactgcctatcagaaaaaatacccaaggccgtagatggttctatcaaagagagagttttctcgctcaacaaggatttacttcgtagctccggatcctatgctgtcacacgctacggctacagtttgctcagttcaggcacctgctgctcctttaagggagaccgagcaaaaacacttacggcattcaaatagagctgtttgttcgaaatattcatagttcaggtgaatatctacatgtaactaaggaccgggcttgggagagacggttgatgagcaggtcttgagaagaatcaacttaaatgaagtaaacacttgctagtcaagatatccctggttcagttgctaggaacgaccgtatcccaaggttggcaagctttgtgctttctagtgtcaagacaatggaatggttccattggttcatgtatgtgatctacacgggccgcaaagcttaacctattgagcttaaaggcccacaatagaaaataggccacaatagacaataggccacaatgggttggtattgtgttgggagcctattgatggctattgatggctattgtggcaattcattgtttggagggggttgcctgggcagggtccgtttgaatgggcagtcgttcaattgaggaaggaacgcgtaggaagaacaccgcgtaggcctgcctataaaacccaaccctcgtttttgttttctctttctcctctctctctcttccccctcacacatttatcgcaagaaccccattattaccaacaacaatggctgtttctcgcgtcgtgtttttcgtgcttcttgcggccatggccgcatactggcacactgatcttttccaactcgttggaaccatcgtcgtctttctcgttgccttggtggcagcgggatgctgcatgagcaggtaagtttggaagccttcatccttcatctgtcccctccgtatggccagcctctgggtcatgtctcatggcatcaaaagagttgccatcactgccttgcccaagactcatcccacgcccatcccaactccatcactgccttaccgaagcccatcactgccttgcccaagtcacatcccaagcccatcccaagcccatcccaagtcacatcccaagtcacatcccaagtcacatcccaagtcacatcccaagtcacatcccaagtcacatcccaagtcacatcccaagtcacatcccaagtcacatcccaagtcacatcccaagtcacatcccaagtcacatcccaagtcacatcccaagtcacatcccaagtcacatcccaagtcacatcccaagtcacatcccaagtcacatcccaagtcacatcccaagtcacatcccaagtcacatcccaagtcacatcccaagtcacatcccaagtcacatcccaagtcacatcccaagtcacatcccaagtcacatcccaagtcaaatcccaagtcacatcccaaacactcactcaaacactcgcccaaaagaccattaagactaacgttgagtagctcccgtgggtggttgttccgactgctgcaagctgcagcagtgtcggtcgttgaaccaacaccgaccaacgacacccccgccaccaaggccatctcggccaccgaggccgagatgaagagaatttcgacactgagagcgcaggtggggattttggagcagcagctccgtggcacggaggcacgagtgcgtgactccgagaaagcccgggagatggagaaaaaccgccatgacaaggaggtccggaacaaggacgctcaactggcaaccatctctcgggggatcaaggagtcccggtacgtgaaggaccaggtcatcgtcgagtgccgccagtggcggcgcaagttcgaggacctggaagacctacagcgactggcccagctaaatcccgttcgcgggatgcagggacgtactcgttgggcccctgccaacaaaaacggagtgcgaaaggggaatcgtgctcgaccggacaaggagttcactgccgttgcgcaggtggcaattgtcaatgcggcgtgggagtcgaagatggtcagcttcgagaacgaggcccgtgcttatgtggcccgcacggctgaccagattcggtctctcaacgacgctgccaccgcgctcagcaacgagaacgcgttcctccgccagcagatccaggcgacttccggcatctcccacgagctggcccagcagcaaatgggggaggctgtgagaagcgccttggtgaacgccgagcagcaacatgaggagcgtgtcaagttgctgaagcagacccatcttggggagctgacggcagtcaaggtcgactacgagggaaaattgactaaggcgaccgcggaatcgaaggcggaggcggagaccgcactttcccagcagcgtgaggtaggcgagggagcggcacagcacgcactcgccaccaaagaagcgcagctgggggagctgcgtgccacactctcccagcagctcgaggcgagcgaggcagcggctcaggagacaagttccctgaagcaggcactcgccgccaaagacgcacagctgggggagctgcgggctgcactgtcccaacagcatgaggcgggcgagggagcggcacagcacgcactcgccgccaaggaagcgcagttgggggagatgtggaccgcgctgtcccagcagcgtgaggtgagcgaaggagctgttcaggagacaaattccctgaagcatgcactcgccacccaggaagcgcagctgggggagttgttggccgccaatgccatgatttccgctgagctacaggctagtaaggaagagcaggagaaactggatggtgacatggaggtcgaaacctccagggtcgtccagtacgtgcaagagagggacggcgctattagagccggcaagaaattgcaggagcaattccatgccctgcaggagcagtacgaggaactacggtcctcgtacagcgaccttgcggtggagaaggcgggccttgaggtagaaattggggacctaaaggaagcagtgtccgacctcgccgaccaaggcgaggcgatgtaccaggaggtcgaaggcctcgagggcaacaaccgagccctggcaaatcaaaactccgagctcttttgccagtctttggcatcagacatggagctccagcagactcgggacaaagtgggcaaccttgagcgccaggtgacggattaccagacggcggaggcggcggacatcacgtcggcggttagcggcatggggttcaacgctgaataagcgcccatccgcccgtcttagcctcccccggtctccgtcatcctgctgcagctcggttgctcactttgttgttgtcctcacactgcttcctataggttctcaacccgcccccacctccctctctatcttccttgctgttgtctttgtcttccccccccctattcctcgctgttccatccctcatctgatcaccccctctcacccccctctccggcgcgaccgaccccccgcgaccgaccctatatatatacatcgcagcatgtctcgctaatgactctcggtcccatgaattcaccataccgctcgtttgccgctcggccagtgatgctgagtctggccaagcttgtgctcgttgcgatatggcaaattcctttcaccacggcggcgcctgtcttctcgcggcttgttctgtcatctcccgacacagaacaggggaaggaaccgagcgatccaagtttatggctttatttgggattttcggctgctcttgtgttgagcggtggagcattcgcgggtcttacgattgccctgatgggacaggttagctctttccaatgcggctaaaaaaaaatccccgatgagccaggctaacgtcttgattgtttcgtacaggatgaagtttacctccaagtcatccagacatctggcgaagggcacgagaggaaaaatgctactagtgttctcaatctcttgaaccacggaaaacattgggttcttgtgacactactcctcagcaatgtgatcacaaatgaaactttacccattgtccttgaccgcacgcttggtggtggttggccggcagtgttaggaagcactgctttgattgtcatcttcggcgagattgttccacagtctatctgcgttcgttatggtcttcccatcggtgcctggatggcgccttgcgtcctggtcttgatgtacatcatgtctccagtcgcctggccaatcgcaaagctgctagacaggctgcttggagaggaccatggtaccatctacaaaaaggccggattgaaaacactcgtcacactccacaaaacattgggcgaagccggagagcaactaaactccgatgaagtgaccattatcagtgcggtcctcgacctcaaagagaagtcagtcggcagcatcatgacaccgatggatgatgtcttcaccatgtctgcagacactgtgttggacgaacgcacaatggacctcattctttctcagggatattctcgcattccaatccacgctcctgagaatccgatgaactttgtcggtatgctccttgtcaagatgctcattacctacgacccggaagattgcaaacgggtccgtgagtttgctctggctacacttcctgaaacacgccctgaaaccagttgtctcgatattgtgaatttcttccaagagggcaagtcacatatggttcttgtatctgaatatcctagcgaggatcgtggtgctcttggagttgtcaccctggaagatgtcattgaagaactgattggagaagaaatcattgacgaatctgacgtctttattgatgtccacaaagccatccgacgaatgacgcctgcacccaagtctcgtgtcgccaaaggcaagatcgtcgaggaacctcctttgaacccctctatcattcccgatggcgacttgatcgacgtgaattccacacaaccctcatctttccctaggccttccgatttgattcgccgccgcagttccgtggaagcacccctccctcgctttcaacttcgaaagactactgccgacataaattctgactcggcaaatgagtgggttacacaagtcggcgccacagatgagattcgagaacacctgaaacatcttggtccttccaatctggccagtaggccgcgccaaacccgttaccattccgtcaagatcaagcgcaacggcacctctccgtcccgttctgcacaaaccgactttgagtccggacaaagcacctccgactcccaaaagcttcttccttcttctaccgcataccaaggtggcataggtgcgggcttgctcaactccgctggaacagacgcgaaagacggtgcgcatgctctcaaactgggctacggcaccatgctttcgcacgacagtgtaagcaaaagcaccggtgctcatcaatacaaggaccttccccaagtctccattcccgaggccgttcgtgaggaacatgaagacctaccgcgttctgggccggcgcgggaggctagtagtgatgctctacgtgacgattccgaaaaccaaccgcgttctgggccggcgcgggaggctagtagtgatgaaggcagtgttgaatcgtctggtacaccaggcttcgtttaccaccaccgcggaccggcgcgcagtggaagcatcacagaacagatcgtggatgtcaatggtatccggaaagttgttctgcatgcaaattgcaccagttcttccgagggggaatcccatgcaccaggccatgatcacaaccacgaccagcatcataccgatggtgcggtccttgagaccgatgttacaaaattcgaaacccccgacgccggccacgcaaaacccaaaaagaagcgtcgccgaaagaagcatggcaaggcttcaaagtctgatggcggtccctcagagaaccagccgttgctttgatgagccgttagttagtttaatgagacctgtcaaaccatgtattttcacttctttttgtaccacagttatgcctgtagtcatgagatgtaaaagcgcctccgggaaagtctaagtatatttgcattgctttggaacggtatatgccaactaagaagcccaaagcctcttaactcgcgtaggaacttgatataccacatgaacactgggagtagatttcagtcaccttggacagcaattgttgatttaaatgcaacattcgtggagagaacccagaacaggccagcacgcatttacatgtagactcttaaggaacgaaaatcaccacctttgagaaagttgtcttacccataggtaaactatcatgttaccacccactgcctctttctagatagtgagtgggtgtgacatatagagctggattgcccaaacattcagggactaagactcgggattcaataggagcctatgagtgtcttactagcaatccttttcaaacaacccttaatgtaattataaaagccatctagggggaatttaacattagaaccagacacaagtaggcaacctatacaggctacaaatagttatagtacacggatagatgtacaaagagagtaaatgaagttgtattggccggcggcctgaacctgctctaggatgtaacaccgaaagtcgacagtatgagcctcggaatgaaagccatctaggactcactcaaaagggcgtcgtttaatattctgaagtccttggagatatccctcgatcgagtcggacttctccttctcaacccaacccttagtataaactcccctaaaatcaatcaggtatacatcctcattgatatcaataagtatattggccgcctttacatctccctaaatgatattatataaatgaaagtgttgaagtgtgtgtgaaacctgatcaaaccatttttgtcaaagctcggaatatttgggattatatccatcaatacagttgagtgtagctctactacaattgatatataagaagactaatcctatgatatacccattatcatcctagaccagccctcctagttgcgatatgagaattgggggatcgaatttagctatataaatctttgaataagtgagaatctcttataagaatacccgcattaccctaatagactagcttaaagaagctaggccgtggtcgcctataaataaataatttccgaggtattgctggcagtgcagctgagtctacactaattggaacttggacttccctaggatggtagacagaaaaactcgagtagtcgacggaggatggttgcatcctcttggtattactgagataaataggaactaacttctcttccaccacctgcacagtgtagtgaaattcttctgcaaacagatagtcgttaagcgtgtacttttggctcgggtccaggggagcaaattcgtggaagattggcagaaatggccgtaaggcccaatcatgcatttcttcaagagggtcttcaatttccctatcatcatctatctcagcctcatcgggtatccattctggctcttgacgtcgaacgtgtcgaagatgttcggccaggagggtagatgagctttcgaagctggaagcaaagagatcaatttcgaagcgttttttggaaacatagacattcaactgtgtgtctttgtttttggtacttgatctaaatagaccgatttcatagatgggttgctttcgtgttatcgctggcagtcgaggagtgcaaaaaataaaggagatagagagtgcagtttatcgatcaaatcggattggaagctaacagagaactagaagagaaaaaggaacaaagagagatgggaacgaagaagcctttaccctaggcattggtagagtcagctatagacggttatatctaactagccgatgatacctcatatctgcagcaggttggcaattgggtctccgcagcagcctttaccattgccaccctaagccaaaaatcgaccgtatggataaaggcgtattggagctagacccaaggtagaattatcacaggttctcctgttacatctacaactataagatcaagacacagaaatggagcaaatttgacttgattttgctcagactaaatacatgaatgatatctcccaaaagactcccccagataacaggatgagacgacgacaaagtgacaacagctgtaacaaaaggtatatgtaatagtccatgtgatgaatcgatcattgcagaagagggtcctagtgggaagttagttttgcaaaacaaaaaaagagtacaggtcgaacataccctgaagtgcttctggtgattgttggctttttgaacgcgggcaacgtagcggttctcttggcgaagggcacgagtcctctcgcggcgctcggcagtaagagcagcttctttttgttcgtcggtaactccaatcatgcccatgccaccgttggcacgagtgataagagagcggtgatggttggtgcggccgcggggaggttcctcctcgatttctccattcgcaatggcaagctggcgggcagctcgttcggcggctgaggggtatttgtgcaggttttgtcggtaatatttggcaagcgaacgatgaccgacactctttccagatggaaggtggagctcgtagtctgcctcgtaggcacctgaggcgtttcgatatgagtcaagatcgtcctcgtcgacggaggatgcagaactgtcggtttcccagccttcatctccatctccgtgcaccttgacgccaccgctcccggcagtggattcgtcttcatcttcggagtaggtgcttcggaaatcgtagtattggccgatttcaacttgttcttcttcggactcgaaggcaatcatgcagtggctcttgtcgcgcatgtgggtttggatggcttgtgcgtcgttcttcatagcgtgacagtaaagacattcgaagttttcggtgatttttcggtagagataatgcacgaggccatcgagatccgacaaatatttttgttcggggataaacatgccgtgctctatccgcatgtggtccacgttggtgtgaatatcagatgattcagttttgcagaagagacaccgagtcgccaagaactcgtccttcttgatatcactttccatatcctcatcttcttcttcgtcaatggtggcagccttcaggtcctcggtgaccttgctgacgtcatcgcccgatttggtcacgggctcgccgagagagaaagcggaactttgtacggaggcagcatcgccatccttacgtaggctggccgcacgttgcttgtgcttcgagctgttcaagtgattcttgtacgagttttcgctgtagaatgccttattgcaagtgtggcatgtattttcgtacgaagctttggcagcggcctcattggatgtagctttggcggccagaactttctcgttgaaggtttcgagagtgacaggtggcagagaggcgatgcgacgcttcatgttgtataaactatagaaaatcagcttctgaagtcgcaaaaaaaaaaaaaaatcaagacggaaaagagacttactgccagtctttgcgcatgtgatctctctgaacatcgctgcgttggaaggcaacgagacaggtgttgcaagtgtattgcagcgaggctgcgtcttgggtggtcgacgacatatcggtagattttcgagagtcgtgggtggttgtaagggcgggtttcccctttggattgtgggataaatatttgttgcaggcggggtacatatgaaggctctgcctgggcccgatttgaatgattttttgatgatctgagtgtatattgatgatcaaagtagatgaaagtgatgcgatgcaggtggatgtaagagagaagaattttcggagggcaatggtcctgcgagtgattctttatacactcgatagaccgtcatccagagttgctccgccgcttgaaattgtttcttatcgagcgactagccccctctcgaattccactagtcctatactggttagcgtggttaccgtaaacggcttagtagccttcgaaaaggccggcggaactgagtggaccaaggtccgccggattatttaacttccgacagctccgatgccaaaaggggaaatattttgcctgaggcatcacatcttactacgttatcaggtaagctggagcgtcttcaaggtaggtcgcatttattcaacgcgtggcgacgagtaaaccactagcgctcatcctcgcatccagctgctctcacaccctcagaaatgccacactgctaaaaatgacgaggctccgtggaggttccatagacgacccagacatcgcgcaatcccccgggcacgggcgaacgaacacttatcggtcaaagctcccaccaaacgcatcggatgcgctctcacagaatactattgaggtatccgatccctcaagagtgctaccacggtatcgcgatgatcgaagacgaaagttcaacggcttagtgcgccggtgagtgggactccaaacgctgggcctcgcctcctaattccgtatgacactaattgattttgcggaaaaggtacaaagctcaactgcttcacggctgcgatgaccccggatgtcgaacagctacatgtgctagtcatcgccgaagactcagtgaaggtccatatcgtcggtacacagaacttagtgcgaggacgctggcatgctacctcgccagcttggacgacccggagaccggtctatgtctcaatgtgcctaagcctccacctcaattgacagtagaagattaccatcggatgtccctgcgccgaacccgtacacttgaagcacagacggcagcggctaatagatcgccaaaaccggatcagtatgacgaagaccacccgacccgcgatatgtccaggcctgcgcaagatagatcagcagtgtcaaaagtgacagaagggggttcttcgcctcaagtcaacaccggtagcagctatattcgggaccttgaccataccgcggagcaacaactaaaagaccccaagtcctttacacagaatctctttgatacaatctcgctccgtatggtcgaatggcttcctcttcgccgtgctgcggatgcattagagtcaaagtctaaaccccttgcaccgggaactgcgagctatccatctgctgctgagaagcaccactgcgatgccgataaagttccaggcagagatgtgaagattccagcgagttccacgcctgcaaatcagcccatctctcaacctcgtactccttcatcgcgaacgtcggcatcgcaaccccctgcggtcgagctcaagttccagaaccagcatgtcaagcgactgtcaatctccgaggttgaccattggcgccagagtccacgatcaagccttgaagataaaaagaaaccagaatttagcaggaaggtcccggtggcttcttccgatgagtttgtcagcttgccctcaccgccggcgttaaagcaccgtccgcaaaagcaccgcggaagaattggggacgtcgattcggttcctctgaagggacaccgcaaaagtcaacgacgtgtctcctgggacagccagaagctgctcgatgaggtatctcctatcaacaatacgaggagcaaggagctcatgcctcctcctcgccctttcccttctgttaaccaatcccccagtgagcgcaagacaaagcaacctcctgttgaaaattcgttagacaccattcctctggctcagacgatcactcatcttacccccgagattatcgatggtctgtcacgggtcatgattgaatctgcggaagatgctgattgctgggaggaagagcttgatcgtattcagtgcactggcagctttgagcagccggattggtgttttgcaactctgcgtcagcgtgaagtatttccgttcgttgcccaaagtgtatttttcgtgttcagcagccccaatcaaattctgcgctccttcagtagcgagccaacagatatgattgggactactttcagtcgccttgatgtttcccatctgcgtttatcgctgcagcgcctgttcacaatatgcccatgggatattgcactacatagcctatggagctctctggacaagctctttgttcccccgcggggatttacctcttctggacggccatcccgccgatcgtctcgcagttcgaccatgacaggacctgcggcccctccgatcgttccccgacgagtttctgaatctgccagtgaccatcatatgtctgatcctgatgctgcctacattgccacgattgccttgttcactttggtcagcttcgtgcctaagattgacttggggacttggaaagcggtggttcggatgcgtgccgctgggtctgtagcctcgctctcggacatgcgcaagctgccttcgaagaatgcccagcaagctatcgaggtgacggacagattcgagcacgagttaggtcttcgcctcattaatcgcctcgtgcgggctctcactgcacgactggcgtatcatgaaatctccaaggcccgccaagtgtacagcctcgacgtaccaaaacaacgaagactcagcgtattggatcgtgtcattgactatcttagtgagcaatacatctctcacactgctggcagcgatgagcccgctgagtctatcaacccatcctctctcattgttgagtggcttcggactcttttcctgcgtgaatgggacggcaaccccgagatggctcgtagcagcccagccggtggtgccgttcagattctagcctcaatgtacaaggaacgaaaccggttaggtcttttacccgaagacttccatacacctcttctcacggagcggctggacccattggatatgcccgtggcatgggttggaagcctcacaaacaaccgaaccatgcatctgctatcatattctttccttttccctccgtcgtctctcgtgatctacttccgtgctttgaactatgctgccatgaccaagtcctatgaggcggctatgaccaccacgagacatgttacgcagactgcctttggcgccattcaaatttccgatgatcctcgactcctcacctccatgaaaacatccatgtctacttacctcgtcattgttgtccgccgtgacaatattctctccgatgctctgagccaattatggcggcgtgaaaagcgagaactgatgcgacctttgaaggtgcaaatgggcatggatgaaggagaagagggtcttgaccatggtggtgtgcaacaagagttcttccgtttgctaatgggtcaagcctttgacccatcttatggcatgttcacggttgatactcgacaccgcatatcttggtttcaaccttgctcattggaacctctctacaagttcgaacttatcggtctgttgatgtctattgcaatttacaacggcctaaccctccccgtgaatcttcccactgctttctaccgcaaaatgttgggtctgaaggtgaagcatctggaccacatccgagatggatggccggagctaagccaagggctcgactcattattgacatggaaagatggcgatgtcggcgatattttcacaagaacttacgagttcagctttgaagccttcggaagtgtcgagacagtcgacatggaaaaagttcatcgtgatgcagcgtggcctgttgctagcaaagtcaaaatcaccgctccggctcctatagcgggctccagcgcctggatggacgtgccagcttactgcgaccctgcgacattgagatcaccaacctccatggcagtcgaggagaccaccgatgccacaccttgtgagcctgccccagacacggccgtcaagtcagtatctgagtccatatcacttcagtcccctctactccaggatgaagaggccgctcttgtgacgaataaaaatcgaagtcagtttgtcaaggattacatcttctggctcacagacaaatccattcgaccacagtttgaagccttccagaggggcttcaacacatgcctggaccgatcggctctatccatcttctcccccgaagcccttaaaaccgtggttgaaggtattcaatcgattgacgtagacgagctcgagaaacatgcccggtacgagggtggatttggtcctgatcatcgagtcattcgtgacttctgggatattgtccacgaataccccaatgagaagagggcccaattactcgaatttgtcactgctagtgaccgagttcccgtcaacggtatctcaagcattatgtttgtgattcagaaaaatggcgttggagatctggtaagttctgccactttttatagcctacataatatggattgttatactaattgctcttctagcgtcttcctaccagcttgacgtgcttcggacgtttgcttttgccagagtactcttcaaaggagaccttggcaacgaagcttgacaaggctctcgaaaatgctcagggattcggcgttgcataaaaggttgtcagattacattttgcctatacatacccatttgttcgatatttcattgatgtggtgttagcattctatctcatacggtgcaaatagcatagtttcatgaagcacttgtctttacatggacatctcacgaggatttaagatagacaaatcatagtttatagatccccatcgtactccaatgcagggctctggttcgcctgacgatgtggcgctccgcaaatttataccaaatcggacttctgaggtccggcgatgactcttagcattcacatccctaagtgtatctgtttactcttttactcgcacatatctctttacattcggaaattccctttgggccaagtcttctgtataaagtaagacactccgattcgcacgcacaacttacccgctatcaccccccacgtcccgcgataagcgcccatcttcgccttcaatatctgcaactcctgcaagttctaacgtgaaatttaccagcttactccaaatacccgattgaacgtttgatcatggctcccattattcactgcgtccgccacgcccaagtatgtccttatagtgacagtgatcgcaactccctgagcctcgacaactaatgcgcaacatggctcttcactgctcagtcgagctaatagataatcgcagggcctgcacaacgtttgcaccgccaaccacattatccaagaccccgttctcaccgagcttggccacgaacaatgccgaaagctccgcgagagtttcccccgccatgccaatatcgacctggtaaccgcctcgcccctccgtcgcaccatctatactgcgctcgagagctttgcgcccgtctttgaatcaaagccggacttgaagattatcgccctgccagacattcaggagacttcggacgttccgtgtgataccggcagcgacccttctgttctgaaggaggagttcaagacgggggttgatctggatcttgtacaagatgggtggaataacaaggtatgcttctcattttattgcacctcgaaattgccccattattatccaaaacgtggattactcacatttgtcaaaaggcatctggtcgctacgccccaaccaacaaagctctcaaggaacgcgcccgtgcagcccgtcgctggctgaaagcccgcccggagaaggaaattgtcatggttacacacggaggcttcctgcactatttcactgaagactgggaagacagcagccagttccagggtatgtgacgtcaagctacgactgtggagaatcataccgctgacgccgttttccattgttccaggcaccggctggtctaacaccgagtaccgcactttcgctttcagcggggaagcacacacagatgatctggagggatacccgctggacggtgataatgcctcacttgaggagacacttgaatcacggcagcgccggggtaagactggacccatgcctagccgggaggaacagaagacgctgtataagaagggctaccagggttgggatgaccagggattgcagatgagcactgctgatcgggaggcggctaaggccactggaggtgaggaggtcaatggggtccgcatataactgggcagaagaagtgtgttttgatggacattgctatcgtaattttcggttgtcgcagatggcgacgggtaacaaggatagagcgagtacatacatagatctgacatgaaccaaaatggattccttggattccttggatgtccaagactggctctttattccattgtctgttgctttatttgcgttagtccccttgactattgagccccttgggctattttagccctcggtggctgtttcagcaaacaatagaacaaagctgacaagcatgcattatatgcctccattgttgagttctttactcgatctaagtcttctttatcttcggttgtgaacaatgaccttggcctcggaacacgaaacagtctgccatagcctcgacaaggatgccgacaaaggatctgtagaacaactatgaactaagctacccctttgtcttggatatgattgtctatataatggctttctggcccctcgcttttgatcccgtcatcaggagcaatccagcccaggacagagctcaacacctacctgtcttccactactattgcgaaccatccgctgagtaccctttccattcatttttgggatagacactgacaccattatctaggaatatttacataccgagaataccttcttattatatcacaggtgggaggccccccgcaagatgcattgctaacatagaatataacataacagacaaggacaccgaggcattagacgacgagtaccaatccgaacatgcatattacctgtctacggctaagttctttgataacccttatactccccccttggcttcctctactaacgagatccagagattaccgcaccacgggtcgttccagacataccgtcttaaatatcattacacatgcagtaggtcattcccgatgcgcagagacatactaacagaccggattagatcccatacgaaatatttcccccagagggatccaaatagcgactagctgaacggctaagttctttattgcccttcttagaaacatgaattcagtactaacgaagcataggcccgccgatattctttattcaacatcatcacatagctcccatattaaacagctaagtcattcttcgtcctcgtgttactaacccgatttgtatagatacatctcgacgatatatgcacagtatattgtggctagctattagcctagactggggttgattatttgtgccaaatattgcacattgtcttatttatcaagcagctaggtcattcccttgagcccccatgttgactaatttggagtttacacgcagccatatatcactaggccaccgggactagcttgattaattcaacggatgagctgttcacaacgcacctctttaaggagactacctattgttatacttgccaagcagctaagttatcccttctggaccccattacaactaagtggtatcatatagatatcgatgcgggtactcctctcgaccaatctgcaattggtgacggctcgtgccgtgtacgagattagaaaatcgaggcatttcactcttgccaatacccatattttgctgcttagcagcaagtgaccatgagcagactataccatttattaaattactcttgtttctgtctcgctacataatactgtcacctaggaatgaaggaatggatagaaatgggccttttctgattgacatatcctcgctctgatagtagctgatcagctagtacaccacatcgtaaggtaaggtaagatagatacaattatcagtttgataatccaggaaattgtgttccaggatccatggaactttcaacaaacttgtctactgtgccgctccctcgcccacctcacgctgctgggaaagtgcggtctccgccttcgatcccgcggtcaccttagtcaattttccctcgtagtcgaccttgactgccgtcagctccccaagatgggtctgcttcagcaacttgacacgctcctcatgttgctgctcggcgttcaccaaggcgcttctcacagcctcccccatttgctgctgggccagctcgtgggagatgccggaagtcgcctggatctgctggcggtggcagcgtcgtggagagactgaatccggtcagctgtgcaaaccacatagtttcggccttagtctagaaattgaccagtttcggcccaagcgccgcatcgacaattgccacctgcgtaatggcaatgaactgcttacggtcgaccacgattcttcttccgaactccgtatttcttggccggggcccaacgagcggatcagtgctaactttcgtcaaagtttctcacatcaggtgtgaaatcctgccattttcctcaaggtccaatgaaaaaattggatgtaacgccgacgaggtagtgtggggttgtaatgttgcggtgctccagggttggagaccgatagcgcacaagtagagtgatcgaaagatgaagatcactttgaaaagagaggtaaaaagctcgtgaaacttcaacttatagtttattcaggatcaaaaccgataggtagacagatgattttcactataaactaggttagataagtttgagaaatgactcgaatagcctttaccaaggttcttcagctcccgctgggaatctcagcaggcttgacgtagtggtaagctgttgtaaccagccatttaggacgagctggacaagccttctgcctgtgtacggtagaccatcaaccaagtagctatatatcaggcgaagaaagcctcgcggtgtgagacgccagatcgatcttgaacaagagagagtgtattcaaatgaataatggggatggagagagaaagaagaagcaaattggaaattgagaaggaaccagttgatatagctgaccaaaacattgcaaacctcgaaccttctcgctaagctatctagcaaacaatctatctaatggagtaatgcaaacagtaagcgagtaagcaaacatgaagcatctgatagcgatctatcatagatcgtgacacgcgagactaagctcccatgatgagatcgacgtccttgaatttgttagtacactggctagagaaagtcttacttgggttagccatattcctatttcggtatgtatggttccaaccctaagtttaaactgaggttgttgtggggctagcacgtgatcatggctcatcgcgtcagtcacatgactgttcgtattctgggtgatcccgtggtcatgtgatcatacagggtcaccccataccacgtgaccggctgccccaacaatgcatcgccttctaacgcgctttaaatgctggtgccttcaattgacgtacgaatcggccgggggcttctatttttagctgccgatcacccagtcccgtggcgcagacttcacttccatgggcgaactcttgatataactccgcacaaccacctgggtaatctcttgctgcattgtacaccccaaaggacaaaatgatcgatgaaaatttacccagtacgttgtagggactaatttcagcctcgtctcttggtgcagactacgtcatcccctgctagcttcacgattttcatactgaccgcgggacagcgttcttcctcaagaacaactcaaaacaacctcagatcagcacaatatatcatagtcaacatggcaatgaccccgaacctgcttactccttgcacgcgcttgaccccaccgccccaacatcacagaaccgttatggagttgcgctgtacgacccttacgtgacaggcattgtctatggagaggtagctgtagctccagattggactcaaccgagtctgtcggcagacgcaatacgagcaaatggcggcgtagttccgcccccagaacccattctccctaccgattttaccatccagctttacaaccccgaccaagagatcaaagttcaatatcatacaaaatcgtggaacaaaccagcccggtgggaatttgagatgcctcaaaccacattccgagttccttccgcctcagcgctagaccagactcagatcgatccgtctattgctgacattactccgaaattgaggttcagctggcgcaaggatgggaagctgtcgaaggatttgacatgcctcttacacggcaaaacttcaagaattcccgacactcgctcaaagagccgtgagccagatattacggtcgctctatttcaagggctgaaggagctaactctctacgagcccaacctctaccgcgtcgagatggaagatgccaagggtttggaggtcgtgctcctcttagctgccgttgcaattcgagatattttctttgggcctgccaaggaggctttccatatcacccccggtgggctgaacgaaggtcacaagcaagcagcagtgccaacttcaattacagcgacggccacaccagctagtgatcccagactcgatcggaagaacccacaggcccgaccccctgggccaacaatgaatggaaagccatcgccgcctcgactcagcattcccaactcctcatctccggccccacaagagagaaggcgacaggacgaactcgcaaaacaggaagaggagcgacgaacccaggaggttctcgccgcagaaaaaaaggcacggcgtaagcgggaagcagaagtcgagaaggaaaccagacggctgcagcaattatacggacaagaagaagaacaagcacgaaagcaacgacatactcctgccccatcttccaggccctaccccccaccccgacataccggaccccctcaaccttactcgcaccaatactctcaatcctcagtccaacttaactcccagccagtagcccgtccatcccatcatgccaaccaacgatattcccatggcgcacccaccttcgccaacagcccatacctccaagcaccgggccgcatggatccccgagcccaatcatccacccaccttatgcagcgaccacaacaaccacacccgcaaccccggccacagtcgaccgttgcgtttcaccagcttcctaccagtagcggcgctctcctaacagcatcaaggccgacacctcaagtccagccgaggaagagtttctttgggctccgacgcaacaaggaggaaactactaacaagcttgaaaaaaagcggagttctatgttttaatcttgtataccctggcgttttcgtttttcccgcatcatactttgcatctcggcgtggttgtattttgcccatgagtatctcattgtagttgcacagcgattactttcattacaatgcatggcatcttttgctttacaatccattccagacctagtaaattggcgatagagctgttgtaatctcttggtggttcccgaaggacacggcaggcatggaagtccatagcaaagcagaatgcttggacttatttatgtccgtgtgggatatgaccatgtccaccacctataggattatccgagaggaaggagcactgaatgagtagattatctgatctacgtgcaataatcctacaggcaccaaggaagcgtcggaatcaaatggctattctagtttgagtctagcttgagatccgatacacagactggtaaagtagcttggaattatggcctagcaggaatcggttgttgccctcaaggtcttccaccttttggtgcatcgactctccctcgtcagtgagatcggcaattgcttcctttaggcccctcaatcagtgagttcttagtgtcacaagagctctgtactcgaactgcaatgcgtcgtctcgcttttgcaatctcttgccagcccttagggagccgttcctctcttgcataaacttagtggccccatcggtttcgttcgctattgatctctttgatctctcgttgaaggtcgtgggggtggtgggactatggcaattacagccgtaatgtgggtaaagatcgagaggaggacgaaatcttctcttgcgagcttagctgttgtaccggaaatgtagtcgggatattcttgggaacgggggttttcgggttaatcaatcagagccctgtcgactctgacacgaagtctgaagtgaccagatgaggctttggagtatttcctttgtgcataccaatcgccctgagcgtcgggtttctggttcgggggggtgattggtttcagaaagtcgaagaagcttgagactccgacttctagagctgcaattgtttcttcttgcaacctccattattgcaagacggttctgtgttgtagctctccaccagcctttttccggtccattttctgcactcttttggtttcttctaccatccggccgtcgaagtcatcatctgttttcttgctggcctttttttgatgatcggtgtatgcatatcttcaaggagcttctttcctgagccactcccttagcaatgtgtgtttttgtgctagctgtgtcttcttgtgggtagagttctagcccttgctgcaagctttgaatcagcgaatagttcggacattatcactgttgaggtttgacgacgtaggataaagtgagagaaaggtcaaagcaggtaaggaagatatagaataatacatcttgcatcactcaaagtggccatgatggaagagcggtataggcaggtgcttgacgacgtcaagagagctcactgggggaagaggatatatgtagaaaggaagcatcgggggagtgatgagaagagggaagggggtattcataccttaggatatatatacagagcaagggagtctcggaagagagaaggacttaaagagactgcatatttatttgtccctcaggagatgtgaaggggaagaaccgagagagagaagtgggaatatatccgagaggaagaagatctcggggagaaagaatggacagagggtagagtggaaggaggtgtatatttatagccaaacctgagaagagctcggaagataagggtaggaaattaccaggaaagaagtgagttaaggtgatataagtatatcgagttatatagaaagagaaaggctcagaagtaaccagcgatgactaggaggtgtggagggagggagaatatgtatttatacattagtagaagtgaaagaagagaggtcaaacttcaaaggagagaacaaggaaagagaagtactacatactaaggaagagggatttagactcagtagtagatgaagcattttcttagtcgggaagttcccatcttggtacccaatatctaagtgggtatctcgggtggcactactccgtaggtatgggcttattgatgataacctactccgtactattgcggcgagtaattcggtggatcaatggatcaccagttagggcaactgcgtctgatctgccactgtctcggtgtctatagatatgaaatgacgtcatcttcaagaaagccattgctcggcgatcaataaggtccccggtaagtggagctagtcctaactcggcctcttcgctgatccacccgtggcctatggcgggcttactacggagtgtacggagtatgtacggagtgtgtacctgcagtcccctgtagtctgggccgggcgtctggctgattaccggagtaagaactcggtgtaagaaatcattcgctgtcggtcttgcactcgccgaaattcggagctcgggtctatgcggacaagccacaggtgtggccggcaaccaataggagtgacgtgacggggcgcgggagtgccacgttcgcaagccacgtgctgtcaatcatattctcaaactcaattgagaaagagttgccctttcccagaccaataatcgacaatctcttccccatgactctaacagaatacaggaaagcctcacattcccggacgaaagggatcggcgatgcttgcaagaaattatcgttggccccgacggatgagaactagtgagaactgcgccacatttgctcagccattgccgatgtgagctcatgatgccatactccgtccatggtctgacgatgtggttatgtgaagggctggtagaggcctgctacctctcgtggtagtctgtattctggatacagcagataccttgatcatagcaaaactacccgcaggcgaggcttctccgacggagtagttggccgaccatgagtggcagtgccgttgggagagtttaatcgatctgcagggatattgttcgcaatttataaataggggcggaatgttgggaataccctgcagatctatattttctgggagtgagatgctgcaatatcctgtagttctgagcaattctgaaaagggagaagagatcaatttacagagaccaggaataggatgaattgaaagggtcaattgactatccaattgactaaaaatgtactctgtaggtaaaaaaatgatgtatataacatagatccgatcaggacctgaaacggcttttcttccccgcaggcccaacgtcctagggctagcagcctgtcaatttcccctcctcgaatcaactctacttgcttttactcagctgaactaaacccgcgaaaaatgaaacgtaaaccacatcttccatctgcccccgtggtaatatcttgtcattgagaccattgagaccattgagaccatggtgggagttccgcacagtacaggctgtgccctgtgtcgcgagcgacggatcaaggtcaatatccaccaaagtaaggttcaaggtcctgggctaataaggtccatagtgcgacgaggcagttccagaatgcacccagtgtcagaaatatggccggacctgtccgggctacaggcgaacctttcgttttcaagatgaaggccccaaccttgcgcggcgacatcggtccaacacccgacggaaggggagaagcacattggcaggacccgctacgtcttcaactcgaattaaccaattctcttcacacggagacccttctgcgactgcagagatagtacgcggcaatgcgattgccctcatgcgccgacaatcctccttgggtggctgggacgaacaattgctggcgcgcaagtccttccgtgccgcgcagccacaattattcctcgacttcatcagcacgtcgtttccaaccttttattttcataacctgttccggtctggcgacacgcccgggttcgccgaaaatctcgtcatgaattatggccaagacgcgtacctcgactccgccgtttgctgcctgagctccgtctatttagcacacttgactcaagacaaggcactcctcaaaataagtcgacaaatgtactcccagtcgctcagggaggttatgcgagccatcccgaaagccgaccatgcaaactctgacaacatgctctgcacatccatcgtccttagtgtcttcgaaatgttcgcgcagaccgcacccgacgcctgggtcgtgcactcggagggcgcaaagcgactaatgataagtcgaggcccagcagcgcacgagtccgggttcggaagatactgctggatagcattccgcgggttcttcatcgcgacggccgtctaccaaggcgagccctgcttcgtagaccaagaagaatggcaatcctacgcgacgaaagtcaggaccgaagactgccagaagcccggcgaatggtctgcatacggagaagtatccgacttgatcttcatggagatcgccaaatgcccgcggtatatcagcgagacccgggatctcctctcagtcccgtacgaggctgactccacatccatcgcgaacctcatcacgcgcataagtgatacttcgcaacggctgcgctcgctcgccgcggacctccgctcatgtatcagcgcgcacagtgagcgccagcagggtatcgtccagcgacccggatcctttgtgggccccgtagcagagagcttcccggacaccgccccgtcgctgctgctcaatggagcggagaatatgctagagacgctagagcagctctccgaccgtcttggtgaccggttgtgcttcagttctgtcgaggtttattcgcccgagtcgtcggtcgtcacgccgcctagcagtggtagtgaatattctatatccccctattctgcgacgtcgaggagtttcgctcttccctttcgcatccattcagagcttggacagggtctttctaaaagctctgattcacatgatcaccgtgctgtgagttggttggatcgcatcgcgtcgtcgatgggtgtcctcggcgcaaaggtcctcccgggtgatgatccaagtacttcagtgcggatggacagctcacctcaagtgtttgaactgcaatagtcaacgatgatgcttgcgttgacatgaaatgtgatacgaaaagatacctgctcctagccggtctaggatgaacttcccctacacaattacgctctactttatatccccaatgtgaacaatgaaactcaggcattcaattttgatcatatcggcgtatatacgtatagatatatcagatgcaatcgcgttctagtaagaaccactttcttaccactaataatccaaagactgctccagcaagcccctcagctcacctctctcagcctccaactccctactcagagtcggcgcgagcataagcacccgctgctgcggaatagtcccatcaaccaatccctccaaatccgcagccttgaagcctagatccttcaatccacgcggctgatcaccaagcttaacaaggaactccgcaatcgcttcgccaagcacctcacccgcactctcgcgcttaacattcgagatatccacaccaaacgcctcagccgcggcaagatggcgatcagggttcgacgccgcggtaaagcggaagacggcgggcgcggtgacagccaccgaaacaccgtgcgggataatagggtgatccacctgatagcccgcatgtttatagccagggttctggctggaaatggggtagctcataccgtggcagagatggacacctgcatttccgaaccccacgccggcgagcgtagccgcgagcagcatctccgactgtgcttcgtggtcatccgggtcgtggactgcgcgcggtaggtacttgactgttgagcgaagggcggcgagggagaagatgtcggagatggggtttgcgccctggtaggcgggccggttgatggggtttgttgggcgcggtgtgcgctcgttgtatgggattgcggtccaggactcgagggagtgacagaggacatcgaggccggaggcggcgtgcacggctgagggcatggtccgagtgttaagtggatcgcatattccgagggttggcttcagggcccggtgggcaatgcccgttttggctttcttggagacgaggtcgaagatggctgtgcctgttgtctccgagcctgtgccggctgttgttgggacggcgacgagtgggagcaggggcctgtctactggcaggcctttgcccaatggtgcgttgacgaagtcgaggaagtctgcttcagggaagacggtatataggttcatcagctttgcggtatcgattacagagccgccgcctgttttcatgttagtttgtgtaccaggagcctaggggttaagggagacataccgacggccaggaaggcatcaggtttatagggcttagcgaacgcgatagcctctttgatacttaatttgaagactcttagtacctataccacaaccacaactgaagctaggcacattgacttacgagctatccttaggctcagtgcgaactttgtcaaagatagtgaactcaatgccctcacgggtcagaccctcaacagcctgcttcatagcatcaagcttggccacattggaatcagtgacgatgcacacccgcttcgcgccgaggttggtaaagtccattccgacctccttagtcgcgccgggtccgaagcgaatgctagacgccgccatctcgaatgcatattccttctcacgcgaggggtcaatcggcgtggacatgcggcgtttcacatggttgagcagagacgaggtttgcttgtggttgtggtggtggctggggttcttgtggcacgggcagttaggtgggtgggagtattgtactgtgcgtagcaagtttagggcacgattggccgctgagggagcgactctgattgcgggagaaaccattctgtgtaattctgtagaatataatcagaagagagtttgggagaagtcaagctgaagtaaaaggtcaagcgactcggaagagaaagggcaaattggggaaaatgcggggaaatgccccggacttctgcccgagatctttttttttgttttgcgcgctctctcttgactcgctgtttactcgctatttactcctctattcggagaatctattcatatcggtctgatatattctctttggtttctccgttttggagaaactcgaatccagtgcatctatatcccatagccgaggttagttacactcaccgattatgacgtctccaacagtatatatccgtctacggatccacgggtgtgcacaataagaatgagtatgtaatcaaacataaaaagtcagatgattgaattgagcagcactatcgtatactagctctcatatccaccaactataacaatcccccaatctcatacccaaattaaaccctcaacctctcagcaaagcgacaagatcaaatcagtcgaagaatcaacagccctaacctgacttccagcaggcggaaccccatcctcccaagaaatcaacggctcggaaggcttaacattcactgggtaacccgcaaatggatcgccaaagacatcagagagatcataccagactttatcctgtctctggcctcgctcccttgtagaggaaaggttgtacgcaaagatcatctgcggagaactggtatacagcccgtcgcggtcggtgctgatcttgattgcgatgccaccagtgtctgcattctcgcggaaaacctcgctgtactcgtcgttcgggaggagagttcgctccggtaggactgtggaagccacagaccagagatagactgggaacttgcagttgttgtgcactatcgcatggcctaggtttcggtgggtgggtggtggtgtgctgcttggtctcactgagacgaagcttgaggaggggaaggcaccgtaggggatatctctctggccatggttgttgtggattgttgggttcgagagggcgaggctggcgagcgaaaggagggggatgatagttgagaaatacatattgattgattatagagctgttggggtactctttagttatgtcttgcgttagaatcaggaatttggacggctttatatagaatcattcttgttgctgtgtttcaccgcgagcctagttggatctaattcttggcggcaagatgcatataggcagttgctatgaatctaggctcaggggaaattagatgccaagctatgctgtacaccgtagatgtggcgcgaaatgtaggggtgtgaaactaccacaatgtagtagccgaaaagacacatctgtttgtccaacagaaacatatgaagaatgtcaccgtttccccatttagtgcgcatgttgactttgtatccccggagaaagatcggaactcgaggaatgtacaggcctttaattttatattatatgtcgacagggcgagaagaatcaacaaatgggatattctactcatgtctgatcgaagatatggaagaatgtgactggtctactggctccgggtatattaccaaagagaatgagatcaaatccgtatacaaagactatatcgagggattatgctttttcaaggacctttatagtgagttacacccgtggacggcatgacaaactcgcgttaagcaggctgatgcaactatctgaaagtctactcttgatcaaaatagggaatcaaacatcaaaatacaagaccccgtggctagggcaactgtggcgttctagacattcatttctcctgaggaatgtgagctttctataggggagaccacggaaaattcttttgggtttgaaactaccgaggaatgtcagatagaatagacttcagaacaccctgccagagaacacgaattcaaggaacaaaacaaactcagggtagttcatgtggcacgccaaacggtcggtcactcatttgtgatatccccgacgtcatgtccgatgtcccttataagcatcgtgagacagacctaacgttctgtgtagcatacacaaattgatagatgtgacaacatactctgattcaggtcggatgcataggaacatcgctattgggtgtttccgcagccctgtggttcagctagaaagcttaaggaatgacatggctgaatgagatctaaatctaaacaaatatcgacaccctagatgcgtgacaggcttcctgttcttccaattggctgagatcaagacgtgccaagaaaaaaattgtattcaaatatgtgtgacaaaacatctctttagaagaaaaataggtagggcaaggataatttgccatcagaatgaatcgcggacccgcttataacctaagtcatgtggccatgagaccctggtattgtaagccatggttggtggtggttatggagtagtaggcattataggggacatcccggataccgacatactttccgagaccttggtgggaagtggtcgaccggggtcatgctgggtgacgttcttggcggtgcaaatgagagtgttgcaagaagcattctaagtattatggagcatgagtccttgcttgagctgtccggagtgacaaagtcagttggaaatttctgtgaccacagtgaagacttgagtttgaatgatcagcgtaacgatcaagagccgtaggtaaatagcaagatctggaaatcttcctagtgttgagcgttgcgaatcttctcatactcaggcagagcccacttcaccatccattcagattccagaacctgctgagcagatggtctattctccggcctgaaggatagcatcgggcgcgatattgagaaaagagcatctcgttcgttcggttcaaaagaaggcataccctcccttattcgcgcttgctgcacgctcgtttcaaagttatcctcccatgagggatattgggattggggtcggtctactggttctccatccttgagggatttttctcgatgtgctttccacgtttacagccattcgtttggtagcggacccaacatatcgatttgctggcgagtcatatcatcttcgtccgtaaaaaagccttcaaatagcgatctttgggcaatgatctcccagatagtgcatgcaagtgtccagatgtcggacgaaaaggtaagtggcttagttatctcaaagtaagtctccgggggtcggtaatattccattctttccacaccttcaatgggctcatacaagacatggcttgtattcacggttgaatcggtcaatttgaacgtagtgagagaaagtgcacggtgttgaggatgaagatatagcaggctcgcctttttaggaatgagacgatgtgagaaagacgtggacgagtgtaggggcctaaagagcaagcaggactttctcataattttcgtatcgcgatcaaggccatttgatattgaatcgaatttagtgcattttctagcttattcgccttgtctgtccacttggtacgacatacaaaggaggtgaagaggtgatgttgggtctggggtgactttcttccggccctgatcccaataacgtccgtgcgtctggcacggtactcagacacgtctgtctatgtctcgctggacagtaaatactaaaactgatactactacacactatatttcatgtctcatctactagattttcaggctcaaacaaaataattatctcttgacgttgcaacttatttgcccactaaacgcatgcaaaccccaacaactacccctatgatggctccaacaacaagccctacagctatccacacgacgtaatacttgatcactcgtcgcttagagccgctatgccactctgccatcacatccttcatagttacaatgggtcgttttccacggaaatcacgaggctcttgcagatccatggaatgtattggatgtgtgctcgtgtgagcttgctcgggtatcgttggtgccatgatgtcaaggctgtggtaatttggtcttgaccgtaaacctcaatcttattgatagtcaataaatatttttagaggcctcagcaatttgctttcgattgaaactgacatgttttcttcgcgaaatttggtgtcgtctgtttggacgcgtgccggaatcacggaggataagcgatcggaaaagtcccttagaacaaaccccgtaatttgtagcctctagatggaatgaatcacaacttcttagtctaatcatagtcatagatcttgcatctttacgtaccttgctgacttgattcaaacgttgaactacttagaccaacgtgttgcaggagggggttggggggagaagaaattgttagactccgtaatcaccccaatttatgatttatatgctgtagtaattcatgagacccttgaatagctaaacgagttaggcggctaatgctaaattaaccgggacccttgtaaactttaaaaaggatcgacacggcaattggttcgatcgagacgtgggggccgggaagtggatcctctccacagcgggaacccgggtgatgcccaatggaattcatggggccaagtcggttattaaaatgagattttcttcgcctactcataatttgtaacacaccaggcagaaacccctttcaactacgtacttcagagagggtcaaaaaagaatttccatctcctcacttgatatctcatcgccggttacctcgtcgtatcacaaagctacttggctagtggacctataagctaatgtcgcatggtcgactcagtcgggacacagataaccctcgcatatggtcaagccaagattagctgctagtcattttcaatctccgatttactctgagaatatccatttacgcgacgcgaccatggattggttgacaaagttgttcacgggaaaggactcggcgaaaacagaacaaaaagcgcaaaagcggaggagcaaagaacacagccgaagggttcgtgcacaggaaaaggagctccgacgtgggaaggataatggtactgtcaaaaaggcgagctttttctggggatcgccaggtcagacataccagagtaatgttcgtggtccgggtgaaggaatttgaatgggttcggagacaaatctgtgaataaatgaggcgagataaagaagcttcgacttcgtggctgctgaattcgttaatggaaatttctatccgtctgttggacttggctagataatgcctagatgtgtctgatggattcattgacatggacgtagtattattgagaagggaatgagaaatcaacagcggaaattgggactcagtcttggcgtttattggccttaggccgctatatgtatgccttaacatttcccgtgaccacaacaacatcttcccagctcaacctactctatactcttttgagggtgtgatattagattaatatcactcgattttatttctaatggggttagacaaaaccagctatgcttggtgcaaagtcttctaagtgagagacatcgaaatacatggttttgtgggaatgagttgaagctaataaactacagggtttcagaatttgaagcattcatttactcatttcacttgtgctttcctgcctttgagatctgagcctagtatttcaatatgtcgacggtcttaccacatctcgtcggctctgtagacgtccaagcgcatcccctccgtccatgtcaaatttgctgaagaacaacttcgtggtatcatgttcccagtcatgactatgtgaagtgtcgggctagcttggaatttaccgataagcatcacagcgagcggacatgctccactattctgttgtaaatcggcgataacggacaattgttctagctcttgatgatgcaggtactcatctggtggcacccggcgaattcataaccgatgtttgtatcaatcctctgatgaagaagaataacgcctcccgctatcccccgtatcggtcgcctcaagttctgattcctttatcatgcacctcatctcttttgccctcggaatttgggtcgtaactcggaaactgcagctcggatttagaagtattggacttactggccatctggcaatggtcagactgtgtggcaatcggtagacagtctgaaaattccactccaattggctacggagatttcagttgcaatctcgcatttacagactacaagagctccaggtgttcttgtaagggtaacaaatgttacgatcatgagagatcggtgggtctctcttgcctgcgtgggaaggagaacgctccttcctattaggtacatttgtcactttcctttattctcttgtttgttctttcctttccaaggttgtttacactttagctaagcgagacgttcgacttttgcatcgtttgcattagggccaggtatataaacaggctgatccccacttctgcacttacttcttccctctctcttcatcattttgaatcaaccacatcacagcgcaatccatccaacttgcctgccacctgtcgtgtccatcatccatcacatgacttgtttgttcttactatcctttttttcctcataacttacattcatccttcagacaacccagccatatcacaagcatccattcaaggcacctatcatgttcatcatccatcaaacatctcagccacatcatagtgcatcccgtcaacgtgcctagcatctattgagctcatcattcatcacatgacttgtctgttcttactacctcttttttatcgtctacttacattcatccttcaggcatcccaaccacatcgcaagcatccattcatggcatctgtcatgttcttcatctatcaaataactcagccatatcacagtgcatcccttcaacgtgcctgccattatcgtgttcattgtctatcatttgacttgtaagttcttgctgtctcttcttttcatatacttacattcatcctttagataacccaaccatatcgcaaacatcccttcatgacatctgtcgtattcatcatccttcacacaaccaaaccacattctccttccatcttccatcttccactttatgaggtttgtttcttatctgtgttatcgcctattcttcatcttccctcatcgcattctatgacttggttagcacctgatgacacggggctaactgtactagataccacatccactgaatcacatccagccttaccgtgacaggtttcggcttctcgacaatcgtcaggctgcaagaacagcaaacacaaacaaaacaaaaaaaaaaacaaaaacaaaacaaaaagaaaaacaaaagaaaacaaaagaaaacaaacacaaaagaaaataccttggacaatttcaatcaacaacgttcaaacagccacttcaagcatccccttcaagcatccccttcaagcatccccttcaaacaaccatccccttcagcatcaacttcaaacaacattcaatcaagcatccccttcaagcatctccttcaaccaacattcaatcaaccatccacttcaaacaatcacttcaatcaaccatccccttcagcatcaacttcaatcaaccatccccttcagcatcaacttcaatcagccatcaaacaaccatgcacattcaatcaactatccacattcgactactacaatgcttcgaccttaaagaggaggaatgaaaagaaacggtcttggtcgacagagtctccgcaggagtgtctctgaaggagacttctcgtcgggaagaggttacagcgtgtacccatttaaaggagactctcaagaccgtttgctgtggtggtaaaaaaaaaatggtcgcctcgacaagcaagcatcaacattcaaccatccacttcaatcaaccatccaaatccaagcgtctatatccaagttccacttcaaccatctaccttcaagcaaacatccacattcaatcaatcacatctaatcaatcacttccaagcatccacttccaagcatccacttccaaattctactgcagtcaataatccacttcaaccaatcatccaaattccatttcaaccatccaccttcaatcaaccatttcaagtatcctcgctcagccttactgtgacgggcttaggcagcaaacacaaaagcaaaagcaaaaaaagaaaaaaaaaagaaagacaaaagaaaacacgtcgaatcatttcaatcaaccacatccaatcaaccacatccaatcaaccacatccaatcaaccacatccaaccacatccaagaaccacatccaagaaccacatccaagaaccacatccaagaaccacatccaagaaccacatccaagaaccacatccaagaaccacatccaagaaccacatccaagaaccacatcaatcaatcttcaatcaatcttcaatcaagcatccacacttattcaaccacttgcactgagaaatgataatctaaaattctacacgtctccaacctagagctttttccaagctgatataatccctggttatacatagaaaagctgtttgcacggtttatgctctttaccaccttcgtatattgtcgagtattctagctataacaccgagaaggtctaaaaatagatatctaatagcgtagactcccaccagaggacctggggaactgcgcgtatggtggatgaacctgtagagcgagcagagactgatattctatttctagataaattcatcaaaagaatagacgtgaataccttagtgactggtcaaggcatgttagagacaaagaaacagtgttctgctcatattcttctcctcaaacatggcatgcgtgtttcagatatttctttgacctatgaatcggtctttggccttgataccaaagacgaacgcacaacaaagaccatctcgtctagttcgaatccccataaacgccacctccggttctccgcaaacacaggcactctgctcatcgagaggacctccagtcttcaggacaatacaaaatgacctagcaagaaatatgcttaaaaccaaggtgacatcgacatccaaagatgttgcgcagtcctacccctgtatagtcaacgaccttggaccatatactatgtagtggcgtcgcaaattactttttaggaattgaatcagccaaataagacaaggatagagataatttatgtgctgacgtgaattgcaaattacataactccttccatcttcttcatctctttttgtgatgccttgcatttcgtctctttcctcgacatctctcagtcgcaaactccccacccaattcgactcttgtttactctccacaccactccccagtaacacacgaattgacatgaatacagcccacgatggctaccgatcaaatttccaagcctaccgagcccgatgccctgatcctcgaagcttggggccagggtctgatggttggaagtctactcattatggccgctatcactcttgccaatatgaggtcgcatattctcctgcacaagctgatcttcgccgaggtacggtggaagcgaaaagactaactctgtaagttatgttctcaacaggacttggctgattatcggatcgataatagcttgtcctagctatggctcatggtactttcatcttccccaacgagccggtctacggctggtatctatctgtgaccgcggtcggtctcaacatctcctgggctctgcataatgttatcgcctggatgaagaatcgtccattcctgtcgcgaaaggtctcaatcatctacattaccactgttgttctctgttggccttattggggtctagagatctatgccaacttcacatacttcaacaatatcaacaaggtcttcttgaagaccagaccaatggagccattatttcggttggtcatttcaattcctcgcaaatatcgaatgcagctgcttcataactgagtcctccactctaacatgatctaccaacagcgatccgtggtggatcttcacaacagccagtctattctggactatcaagcgcgaatacaacttcggaatatgggagctaatagtagtcagcccccgcttcggactcatgctggtagccatgtgtctgtcgattattttcataatcgttgatacctgcagcgtgttgaaagtcttctccagcatactcccaacaggcgtcgagccgttctggaaagtaagatcccatcgtccgatcttcctttgtcacaccaccctaaccatcccagctatcttttatcttcaaatgtctctgcgacacggtcatcctcgacgacttcaagactgccctcgataacttgcgcgttcactggatgcgcaagaagaacagccagttgttcggtagcccgctgtccaccccgacctctactccagactctagccctcgtgcggatagaatacgcagggatattgagacttgcgattcacctacgacccctacaacccctacccctacgaagagaccttacacccgtgcggtggatgttcctgcgcggagggtgcgtgacgatgaggttgttttctattagccggacccttcggcttcaaattgtgcgttgagaatggtgttcggggcttttagtctggtttcttgacctcggcggttctgaggttgttacgacatacccggacggatagactgaagttattgcgattttacatcgatttgcctgaggagagcgatttatttcaaaagaaaaaaaaaaggagaagcctcggggtcagatagttaatgaaacatacaaatcgtctgcttttctattagtagacattctgccataggtgagatctgcaatacataaaccggagaattgattcggagaattagcatgtcttcatgcagtgtcacatctataagttcttttcctggtctgactagttaccaattatgaccaatgataaacggtgcttacgctttagcgtactctatttatccgagaatgtctctgcttaaaggttggatggaggttgtatacacatcattgaccacttatatctggtattttatctggattggagaacaagctggcaatgcagaaatttacacactcgaggatagtacatcccacgcatcactcggagaattgacggattcagatgacacgacatcccacgcatcctcaatactacaattcggactcgagtctcgaatataaatatagccatttcgcccgtataatacccagactccaatctcttactccatactccatccaatatcccctttgcaacttaacatccaagtaataatggactccctcaacattccacagacccaaacagtcgctctcgtccgttcactgggtgggcaagtcgaattcaaaacagactaccccgtgccaatcccgggacacaacgaagtcctcgccaaagtgctctacactggcgtctgccagagtggtatgtatagtgtcatgtaacccgaccgacatctaacgggatgttctctcaacaagaccttcctaacaaaccaacagatctacacaccaaatccggtaccgcggcaggaccagacggcaacccgataacaaatatcaagctgccacacgtgggcggccacgaaggcatcggccgagtggtcgcgcttggaccggatatcacgcacgccgcgggtctgaaagttggcgggctggtcgggatcaggttcgcgagccgcatctgtcggcggtgcgagttctgtcttgcgggtacggagcagtactgcgttgagagtacaaaccatcttcaccacgaggatggctctttccagcagtacatcgctctcgatgcggattacttgacgattctgcctgatgatgttgatccgaaggtcatgggaccggtgctttgtgcgggtttgacggcttataaggtgggttggggattttgctttcgtggtctggggttaatttgtggttgattaggccgtcttgaacgcgaatgttcgtcctgggaattggttagtggtcgttggagctggaggtggccttgggcatttggctggtatgtgttcttttttgtggtactctggagatacgttgcaatccactgacattctccagttcaatatgcaagagctcaaggggccttggtaattggcgtcgacactggtcctggtaaggaagactttgtcaaaggtctcggcgcgcaggaatttatcgactttgccaccgaagaccctgtaaagagggtgcaacagattactgggttgggtgcacatgctgctgtggtgacagcaggtaatgcaaaggcgtttgcatatgcctgtgatatgctccgggttggcggtactttgagttgtgttggtattcccccgggaagaccgagcttggagactcctatctgcacgattgtgatcaagggcctcaagatcacgggtaatctggtgggatcgctgaaggaatgtatggaggctgttgatatggtacggcgtggtattgttaaacctgtggtcaaagtccgaccgttccaggatttgcctgaggtatatgaggagatgaggaagggtgatatttcagggcgcatcgttcttcaaattgcagaatgatcccgcgaaaactttattgaaattcagattatctgagaattctgttgttgaagccaatccaaaaaatccgatgtcaagttcctttcatcgggctcgctgtttggtgtgtatcctggaatctgagcctgaccaccaggtccattttcgcccgagtgaaggccagaatcttcctccccgattgtcaacaggcgagctggagctgcaactagagcttcagcggttttagcacgaaggattgacttcaacatggtatcctgctcgagaaagggatcaatcttctggtataatgcatgcaaaaagtcctgtggtcctagttcaagccgagaacttattttgtgtgaagacaaaagaaccgtatccgccagggagttggcaacttcaaagcacttcaataactgtaacgagccattagccatggcttgtgtttctgtatatcaaggctactagcctggtctcgtcccaatggtagcaaatccgtctcgctgaaaccccgcaaggcctggagtaaggcgcggccaacttgcgctggaaatccaaatgccaagacgggttcgcacgctgaagaagatagcaagttcatgttgagtgcctcctgccagagaatagtcctcatccactcccgtgtaatgtggtagtctgccgttcgggtcgagacatgattggccatgctgaagcatagtgaggcaaccttgacctcggtgttggtcagatgtgtagccatgatgatcccaggacgcgagttgcgccgtactgagatctggtcaaacgcaataaagagcttgacgagttctagcaacccttgggcatgaacatcagcattcatatccccctccaaatgtatcaatacaggggggtcaatataagacggagagagacccaggtgcaatgaataacctctgtgatagttagtaatttactctgcgaaattgaattctctagcctacctctccgatacccaaagcagcggaaataccaaggcctggtttgaaatcacctcatcttcctcgtgtaaaatatcctcattcaatcgcagaatacgagctccggtcatggcctcctggatgaacatcattgacgaatttcgttggttgaccttggcgtggtacacatgcaaaaagaaagacaccagaacgcttctgagatccagatttgctccatggctgtcgcaacttgtacgcattcgcaagcaagcctgggccattagcgtgctatctactttctgagatccatataccgagggatcaagatgcaactgagccatcgtcgcggcacagagggccatgatgagacaggaagtgttcccagcattggagtcaactttctctgggtatatatcctctactcttctcaaaagagcttctgcgttgactacaggccagacgctgtatgaatattgctggtacagacggatcaccgacgcaaagactgtctttgggatgcaatggaggctgcaggctgtggcggatgaagagatggtatcattgctaccgttttgtatgtatgtatcttcttcaacattctgctgaatctctgtggattgaatctccggaaggtcggtctctcgatggcatactctgcgagatttcgggcccctcctgtgggcaggcctcaggtacgtacagcgcacccgctttgctgcaccgcggcaggtatcgcagggccatgaaccgctgcatttcactttgcgggagatacagatatcgcaggctcgtttgggtggcataaggagctggatttggaagtgtcatgaagaaagatgtcaccttgccaagcgtccaaaccatatgtacaatgcggggaaacattggatcttttcggcacctttgccggtatctgctctcggaattagtttttattatggcctagtggtaaaataccagttcataggtgggctcggccacccctgagcccacctgccttctggtaaattacgctgcacggatttcgtcagggtcttttatgttggagaggttacgtgacggcgtattgggagcgctaaacccaaaatggcaagactgacctgatacagtaattcacaggtccgtcgtttagttacaaagtagaaatagcctttgctcccccgaattaccctctgtcctcaaacttttcttcatttacacacatactccgtacctaagtaccaaatcaaacctccaaccacatcaatcatggctctttccgcacccagcacagacgtgagtctcccatgctatgctcccaacaagccccagaccgaaacctaatcaagaaacagccgcaagtcctcatcacccaagaatcaagcgcggaacaaatcttccacagcttcacagcagaaaccgcttggcagcttggaaatgcactaagggaccgaatcctccgcctcccggacggacagcgccagccggccctgatctccattacgctcaccggcggagccccgcaccatgtggtgtttcaggctgtgaccgagagcggcacgatcccggacaatgagaactgggtgcgacggaagcgcaatactgtgctccggtggggtctttcgagctggactatgagacagaagactgttagtgggcttgcggctaatgcgtccgccgaccagattgaggctgcttttgtgaagaaatatgccgttccaagtgctactgggggtgctgttgcagatgagtatgctatccatggaggtggctacccgattcgcgtgcgtggcgttgatggcgttattggtgtcgttgtcgttagtgggctgaagcaggaggatgaccatcaggttgtggctgagactattcaggcgttcgtggctcagcaagcaaaatagatgtcgaggtatgccggtacacgatatatttcaatcaaataaatttatataagcctgttaataggcactatctataataaaagaatgcgaggtatcatttgtattgtattcttagccggcattaatcaaccaggcctgaaagttggagacagtgccccgtgtaaattcgaacacaaaaaggggactcaagcaaaagaaaaaaagtggaactccatgaataatgcctcaaagataattttacagttcgtcgtggtcaaggggctcgtcatcctcatcaggaggagaagcagagccgtacagcttgctggtgatggggtaagccacactggaaagctgctccttctgctcctcaaagtcctccatggtagcggtggcagcgttgtcctcgagccagtcgttgacttccttaacggcgtcgaggatggactgcttgtcatcctcatcgatctggccacccagaccgttctcatcgttgacctggttcttcaggctgaaggcatagttctcaaggctgttacgggcctcgatcttgcccttgatggccttatcctcctcggcatactgctcggcctcctggaccatgcggtcgatctcctcctgggagagacgacccttgtcgttggtgatagtgatagactcggccttgccggtgcccttgtcggaagcgctgaccttgaggattccattggcatcgaggtcgaaggcgacctcgatctgaggaacaccacgcggcgcgggggggatgttggtaagctcgaacttgccgagcatgttgttatccttggtcatcgagcgctcaccctcgaacacctggatcaagacagtgggctggttatcggcggcagtcgagaagatctgcgacttgcgggtaggaatgacagtgttgcggggaatgagcttggtcatgacaccgccagtggtctcaataccgagagtgagggggttgacatccatgagaacaacatcgaccatggagtcatcgccggaaagaataccaccctggacggcggcaccgaaggcaacggcctcatcggggttgattcccttgctggccttcttaccagcgaagaactcctcgagaagagcctggaccttaggaatacgggtagaaccaccaacaagaacgatgtcatcaacctcggacttcttaaccttggcatccttcagaacctgctcaacaggcttgagggtcttcttgaacagatcaacgttaagctcctcgaacttagcgcgggtaagagtctcagagaaatcctcgccgttgtggaaggcctcaatttcaatgcgagtggacatctgggaagacagagtacgcttggccttctcaacctcgcgcttcagcttacccatagccttaagatccttcttgacatcggtgttgttcttcttgttgtactgcttgacgaagtactccatgacacggtggtcgaaatcctcaccaccaaggtgagtgtcaccagcggtagcgagaacctcgaaaacgccgttgtcaatagaaagaagagacacatcgaaggtaccaccaccaagatcgtaaacaatgacctggcgctcatcaccggtcttatcaagaccgtaggcgatagcggcggcggtgggctcgttgacaacacgaaggacgttgagaccggcaatggtaccggcatccttggtggcctgacgctgggcgtcgctgaagtatgcggggacggtaacaacggcgtgggtgacagtcttacccaagaagctctcggcgatctccttcatcttgccgaggatcatggcggaaatctcctcaggggtgaaggtcttggggacctggttgacgtcgaccttgacttggggcttgccatccttcttgacgaccttgaaggggtagttcttgatatccttctgaatatccttgtcgtcaaacttgcgaccaatcatacgcctgcaattcgttagtgctgggttcttgctgtgacaggtgtaatggaagcttacttaatatcgaagatggtgcgctcggggttggcggcgtattgattcttggcggcgtcaccaacgaggcgctcctcatcggtgaaagcaacgtaagacggggtaatacggtttccttggtcgttgacaagaatctcgaccttgccattctgcatcacaccaacacaactacactcaaagttagcaacctgtcacattgaacatgaacaatttccagactgaggcaacatacgagtaggtggttcccaaatcaataccaataacactgccgtagctctcaggggagttctcctcctgggcgttggcggtgtttccaaagaaggccaaaggcgcaacgagcacaaagagaagatagaagatggtggtccaagcgaaaggcttagacgcgccatcgcgtgcggataggcgagccattgtgagaggtgtatgtataggtatgtggatcgagatttttcaacacaaagacaaagaagctgttgctatgaaagctccgcgcgtgccgctctaaacagctgcgcagacgagtaaacacaaggcgtgtttgactctatgaacccttatgttagtcgatggtatgtgggaaagggacccagggcgaagtgagggaatggtagaatggttaggagaagaatcgaagaaagaggacttcttgtacgcggatacggcccagcggccatgctggccttttcccagttcaggtcacttctcgtgctctgattggctggctggcgtccggcagtggctgactcagaaactgccacatagacacaccgccttctttaataggccctgaactgcctaaaatagtctagtggcaggggtctatccacgaactgctcagggtttccaccaatcaacgactgccagatgatcgaacttgctagaaggggccaaaggtttgccccttcgggagttctagtcactgctactgaccacgtgttactttatggttctatgctacattacaacagcctaattgtgtgtcgatcaattgatgataacaagtggcatctcaatggagagaccaggtgaggtatgtcgtatccccgtactgcgggcctagatttgggccggggatctcccgagtaggtgggcgtggcacaaagcacccaccatgccctgggtatagagctttccgagtctaactctaatggcactaccagtgatacacaatcgaataattactcaatgattgagcttaaatctttctatagtagtatccgaaatcgtattcaagacataatcaccagctggcgagctctaaatcgaatattattctgtgatatatatattttttcagtgtcttactctagatgaacaataatgtgccaccgacgacgagaaattgtggcatatcacgaataagatggatttcgattaactcaacttattccaataaaccagcagccactgttgagcctcccgcgcgcaggacaatcctggtcggtgcttctagaggaacagcttgatccatttcaaccacaacacgcgccacgacacccggtcccacaatcttagggcgtttcttgatagctgctcctgacgctttgtccagagaggcgaccagcttgctgatgcggcccggtacatgtagacggccacggtggacatccacttgcatgggcatcaggtgttcgaaggccagaaccttggcggtgaaagaagtgatggtaggaatgggagaggagggacggcagacaacgtcaccggaacggaggtgaatagggtcgatattggcgatgtttaaaacgacgttttgacctgccacggcccagtcacttggttcgctgtccacctccaaactgcgcactgttgctgtttcaccactaggcatgatcaggatatggtcgcccatctgcaaactaccggcatcaatacggccagagatggaaagcggactttgcacgccacctcggaagacatcaccaatcgtcatacgcaaaggcttttcgagggcgtgtgtgtatggctccgacgtttccagctcttcgatcaatgtgcgacctgtgtaccaggatgcatgagggtcgtcagtccggcgagaaatgttgtctcccagagaccctgagcacggcacaaatgaaatgttgctgtcttggaagcccgcagttgtcaagaacgcggagatctgctgttcaatctcctcgaatcgttcatgatcccattgcacggtatccatcttgttcacggccaccacaatcttttgaacgcccatactgcgcaccaacagagcgtgttccttagtctgacccttcaaccccgactcaaaattgcctacactggaatcgatgaccagaacagcgaagtctgcctgactggcaccagcgatcatgttcgggacaaagtcacggtgacctggtgcatccacaatggtaaaggctgtcttatcagtctcaaactggttggtggcgatatctattgtcacgcctcgtgctctctcctcagacccttggtccatgacccaggctagcgcgaatgagcccttgccgatcttctcggcctctcgccgatacctatctagtgtccgttggtcgatagcaccttgatctgctaacaaccgtcccatgagagtgctctttccggcatcaacatgacctatattggatatgagtcagtccagggcctcaccttgttgccagtggagatcgacttaccaataaccacaaagtttgcggaccgcttgcgggtggacttcttatactctgatataacatcaagattcttgctcttgactgtcactttatcctccactgagagatccttcatgccacctgccagatcagactggcctttcttcaccgctgccgatttcgatgcggctgatttcgatttcatacctacatattattaggcaaatgcctttaaaccttcctgcggatcgccaaacctttcgctgtgttctgtgcattgagaacgacatcgtcggggctgggcgctgcaaagtcaaaaggttcagcatgatcctgtccatagatcctcaacaggtctgaactgttggagtgtaagtggctgggctcagctgctgtcgggcccgttgctgcgccaacgatagtgctggcaaatgttgagggtgaggctcgaatagtaggcagtgtttgctgggatactggttcctctttcgcttcaagcacctcccgttgcgttgattccgaagccttagacaccgatggccttctgttctcggaatcgggctgcttcgatatagaatgcggtgagcttggggttgcgacatgacggagagatccagggccctctgaagcttttggtgtcgacctcccgctagctgcaagtctgtcacgaagggagcgcgatacacccgaatgatcaagcgaggacgtcttaggttgttcaggtttaggagttgacgaagtcgaagtctccggtggggatggtgttttctcggcctctttcttcttccgggctgcagctagggcggccaatttggaaagttttccaccattttccggtgcgcctcccaagagccccaaacgtggaaaaagcggctcaatcaggatatccgattttcgatgagagggaacattgagccagggacaatcgcgaaagaaatcggcagccgaaaagtgtgctgtagaaggaggagcagggtatgctggcactggaagacctgttagaacattgttcaagcttctatggtattagtttcgagtctctatatatcacatggaatgtatttgcaccagatacatacagtttcattcgcaaggaatagcagcactcctgatcgggacgcgcagaatatcttgtgccccaaagcccgagcccagcgacgacactttaggataacaattaccccatgaacactgcttacctgattgaatcttcgatttctgcagcttcgtagcctccttctctctctttcctgcatgcagaacttcggttagctaaatttgacaacaaacaatcgaacccagagacccgtgataggtaatatgatgtgatatgcagtatctgcgcaaattgaacatacctctcaaatagttgaccgatttctcaatatcattgtagtagtgccataatgcgtcttggacttctcctttcgtggcggtcactgagggttgcccggcaccgagctgttgcaaaacagcggctgtacactgttgcaagaactcctgttcctctgggtcagcgggtgcatcctcgtcatagaaatcgtcatcgtcgtaatcgatatccttaatacggtgtcgcgacattgcggcgtaaggaggtggggtaataaatgaggggtttgtaagtgacgaagatggtcaattgagttgagttgaccgccttccgcacggttgctgagtttattgggtttatatagcactactgtaccgccttcttatacgggcataccacccgttgttttccaactcccgacttggtaggaaattaaactgccggcagaacatgggctacgtcatgtcatcatccatggatccatgccttcaattggctctcatttctaatctgaagacaacatagctttgacatatacattgtaacattaatgtcgaatgcttcaggtccagcttagtctatccttgggctagaatctttaattacaatacatattcaactgtccagcttcttatacaccctttcattcggtacttttctttagaaatgcaatatctgtaagatcaatagtgtcatcttttatccgaatagcttcataaaactaaagcatagcagcggtatcatgtggcagacctttactctatggctgagggcgggtgtgtagctagtaatttgaaagtgtgtgtatagtaagtctcgtatatccttgtagtctaaaaaagctacattatagttacctacgtatccatacgctgagtttgtcatagttatctaactttcgcgacacgcaggaagccgaaagagtcaaaacagagtgaaaaaaaagtaataatgttcatctatcgaagtggactgccaaaaaagtcacccgtaccaggcccagaaaagctcccattactcggggtcaaggcaatggatcgccggaaagcctggcgtggggtggtaggggcactgggggatccagtgatgggaacggccgatgttgtggtgactgggaccacggaccgtgtgtcaggagtgctaggagtgttgcgaccgctgtcattctgcatggtgacagcggtgccaggtcgagagagaacggcgacagtgcctccattcttaggaggtgggcggaatcctagcttcgagccttcgcggaagatctcttcaagcatttgcgagacaatacctgcatcctcgtattcctggaattttttccagagacgtaaagccatgcgagcatcctcgatcgaatcatgaccttgtacggtttcgggtgagggttcctcttgtatatgctccttgaagacagcccaggccaggtacctgagactgagacgccggttcttcccggggtggaagaagaggtactgtgtgtccacggtttgtgccttgggcacttgaatgttgattttgcggaaatcagaagctagaccgtgaccaacaaatatacagccgaggttgagaagcagccaaagcttcttgtaagcaaccttgagtgggacaagattgtgttcactggttcgcggatccaagtcaccaggcttgatgccggaatattgggtcacatagtccacaattggctcacggatggtaatatagtcatcaatgaaggggactccttcatgaacacccacaccgcgcaagacggaaacacgggccagcccgctcttgttggggcgtaccatttcctgtgatccgtctgctttgacgtcaatctcggctttttctagatcaacaaactcggtatccaatgcgacaggtgtcccgggctttggcatttcgtcctcagtgagagtttgacacgattcaaccggacggccgccactagaacaagacgactgttagtatttctattttcaagcttattaatgtgcaaaaacttacttcaaagaccactcgcggaatagcagcgttttgtcgagaaggttcttccaagagtcatctacgacatggcgtgggtctctcacttggtaagccagcacgcaaggttgtttccaaggctgcgtaaatcggagcgcttcatctctctcgacctccgtgactaaaaagtcattgaacaggtgccatttgccttgttcttcagactcagcacccgaaatggaaacattgacgaaagacaccaaatgggccttttgatgttccgggatgtcaatttctgcaactaagccaatcagatcatatactgcgagcccgggtgtttgattttggattcggaggcgaagatcatcaccctcaaagcacatcacctgtccactagcatcaacgagaattccaacggcgtcgggcaaccaccctgggattgcccaaagccgacggccgannnnnnnnnnnnnnnnnnnnnnnnnnnnnnnnnnnnnnnnnnnnnnnnnnnnnnnnnnnnnnnnnnnnnnnnnnnnnnnnnnnnnnnnnnnnnnnnnnnnnnnnnnnnnnnnnnnnnnnnnnnnnnnnnnnnnnnnnnnnnnnnnnggtggcccgaggggcgacggcagagagggttggtcagagcggcattgaggacgagaatcaaaggcatacggtggatggtcttgcgaatggtcacttgctggtagcgacgacaataattgcaccatcctcggttttgtgtctctcgctcgatacttgcacgtaggatattggagaagcggaaaagcggattccgtcgtgcgtgtttcatgtcgatattcgggtaaatcagttcattggcgagtgaatttccagggcgcacaatttcgttctggcagaacatgcatcgaatagactcggacgcaatggtggctaagcgctgatcgagctcctcagaattaggctgaatcatccggaagtcttgagctatttgagtcaagaaaaagcgattgacagcttggatcgcagttgagagagatttgttggtaaggttctcttccaagaggcccagatttgaggcttctcggaaactgctgaatgtcttgagaaggttggtagcctgacaattctgcccgcttgccttctcaagcatgtcgaacaaatagcccagttcacacaagagacagtgttcaaaaatgcacgatccagctgcatgattcaaagcgagatttcgaaaaagtgggatgaatttgaaaagctggagaagagaattagtaaaagagttggcgatgtgagtctcaagtccggagaatgaggttttgttgtagaacctgtagcaaaggtgagcgaagggcagcaaatgaataagggaaggacatacctgaaatcaaagtcatcgacaccgaatcggctgtatttgatctctacgttgctgtatttgagtaatggatcgtcatcgctctctccgttgatcttcgcccctgctaatgcctctgcagtatcgctaaccaagccatccgacttgctataatctcgagccttctcactcagaaactttggggcaataagagctggctctgccatggtcaatgcacgagtgttttctatttggtatcgacgagtctttctcgggtttggagcatgatgtcccatctctgcggggcgtaaatatggcaacatggactgatccagcggagccgccggactgccaacctcaaaaagcaaatggcttggccacgccgaaaagagacgttcgtggtaataaggcatcccaactatgttcaacggagattcggaagaccactctacttgaggaggccgggtgggaacctcggcaaattccgtctccttgctcaattcattgaaatgaaccttagtcggtgagccccataggtgaatggagcattcggcatcgttaatagccaatgcttctcctgatggtgacaggtcaataccgagcacaagtgacacattggcttgtctcaagttgaccgaattgggattcatgagatctatcacttggagttgacctgtttgggaagccacgaagctcgtggtgtgaagtttgggatgcatgcgtacgtatgctgctccagcatggaacggaatgggaggcagcggtgtcaaggttttcaagtcataaacgttggccagaggatccacgattggggacccgagatggcggaccgagaagccacaggtgaccagaaggtcattccgcgcatccatgtcattaacacctgttccatgagctttccatgacttgacaacgctgaagtctgagagactgagagcattgactgatccggtatctgttgcagcacaaagataccgactctttttcataattgtgtagccgtgctcggtgggcagcttctcgacaattgtgcccttgtcaatgtctaccgtgaacatcacgcgctgagaacctgcaacaaggattcgattggtctgggcggtgaaactcatacagcggaggtcgaccatctcatcgtgggtaaggtgccactgcgtcaagccccgtcgagtaatcatgtgcacactctttgaggacaacgaaatcacacctcgttcgtgaaatattatctgctgtactgcaccttcagaaactggatgggctcgaacagaggtataacgttgcaattctggtccataaaaggaagagaccctgccctagcgaatcgaacacaatcatcagcatcccgcctcggaaatcggcccgacatcaacactcacatattcattgcctgtccataaaagttccatcatatcgtcaaatgccgtcgctgttgccacagtgggcatggcatggggactcggcggcggcattggaatacgcgacagctcatcccagtcggcctccatgcttacggttgcctctgcggtccaaccccagtaccgtaattatattgtgtgttcggtcttgttactctcggtatgccggtctgatgggcctggtgtaaactgctgtctttacccacgtgggaacacggcgagtgtgggcatcgttcggcgcgagggacgcgattgcggggaagctatcagacgattcggcggtggggttttgacacggtgagaggtttagagttaaaagggcattacacttgacaattgaggatcggctcgaaatgcctgacacgatgaacaaggaacaatcggactccaactactgtgtatgttgccggcgaagaacaggaacggtgagattggtttaatcacgtgatgaccgacaagattacaagtcaacacgagagcgaagatcagctagttagagcaatgattacatgcgaagaagtagtttttttatttcttccaagaacagaagcatgggaatagagccatcagttagctctcattggaagagaagtgggttatatgtatcgaatcctgaagcaaacaactggcccaaaatcaccaacaaagaaccacatccagtatcgtataacacaaggggggtttcttgaattagaatgtcacgaagggaatagaccacgagataaactcctctcgatgcgctctatggaccgttaaacactttctcaatctccaaccagtcgatgtagtcaaccccggtcagtggtaatgtcggattatggaaactagaataaatcccttctgcttccccggaaagatctagattccagtctccctgcatatcaaacattgcgtctgggacatccatgttagaccatggctcgagtaaactgatttcatcttgatggtcaccccggccacctgaggctacagtcatgtatggtggaggatctgaggaagccaacaaggcatcttgtcttgggcctagacttattgtatatgtctgggtcgtgtctcgggtagctgcatcgctgtgcgaggtatttgcatcgaagacatgattcggccaaacgtgcgaataagattgtgcaatatcctgcaggcgtcgctcggcagctagattgccagactttgatagaaatcgaagtacattagatgcttgatcaagcgctggcggtggttgactctgtgatttgtccaaaaatcccaccatgaccagaacaaatgcagcggagaatgttgcgtccagatcaaaaaagccataccgggcttgtgtttatgtcagctcttgatttgaataactaaacataaactgggggatgtagggtctgttaggttagagcactggaaggactcacggatggtttgctggagacgaagtgattcaagtattgcgagacttctggtggctgcctcgtcacacgtatcacagagacgcagcagcatactcggcgccggttcagtagatcgcgactgctgttggctctgagcttcaaaccgagctctttgaagtaatattggccgtgtgcataggatgatggcctaataacgaatcaggaacaataccaataatattttctgttggtgatcgtcccacctgaaacagcattaggtacaatgatgcacctgtgcgagttaccgattgtaaaggtcgattgaagtccaacaccaaagatttagggaatgatcggcctgtgtcatgcagttcttggagaattccctggatcttttggaccaattccagttgggtgattgacttatttccatatagagctgttgtaggtgtattagcatgatgccaatagcacaacggtgtatatcctacttgacattatatcatcagtgacacgcgcaatacggacattgatggcaagggcaactggcgactggaaccccatcgcgttccgcgggagttcagttcgtagctgtcgttcatcggctcctgcagccagcccgagacctgaagagaggcgcctagaagtgtaagttgagtgccaagcccctaaagttgccaaagggcctacctgtcgagcatgtacactgtccaccagagtcttaatctgtgggcactttgagaagggaggcagcgttggtcgacttcccgcagattgcacccaagagcaatagcaagccgcagtgcgagtccaatctaccacacgtcaatgatactgtgcaagagcattgtggatcttacacaacgtacatagagatatgcatcatgtttatggtcacaccactgaagatatgtagcaatcagtgtcagtatctcgacggcgacaacaccttccccacccatatgatgcaacggaggaagacgcttcaacgcttcagcgaacaagtccgttcccggtgtctgtgatgtgggatgttttacatccatgagctttgccatggccatgaccaaaagatattctgtaaaccaaggagagttgatctgctgttgtcttgtctccgggctctgaaatagcaacataagatcgtccgagaaagatcgtgggtcaaagaaatgctggctcacgccaagatagaaaaggaattgatcaagcaagtgctgtgattcttccaaagacgggaaagctactccagcaacattgtcaacgagctctttgaccgacgcccactgaggtaaccgatcagcccgatattgaaaatttgaagtagatccatggaagctgcggtcactagaatgcgacctgtcaagaagcgatctaacctgagactcgaatgcaggcccggaggtcaggtccgttgcttcgtgtagagtcagttcatatttgcaagcagaccaggacgaagaaagcgatgtcaagttacccggacttatagaaggatcgttgtcggtatataataactcagtttgcctctgactggaagaacttcgttgcgcagattgacggcctggggtctcatctggtactactgaagaatgaaatgaagagaccggagcccctacagtttgagagctcagctgctcttcataggttcgtactttttccaagagatgtttcacttggctatttgccaatcagcaagactagccagatcatacgacgcatatgaacgtacgcttcagaaaaccgtctgcggccggaatgaccgaaagtgcattcccagttgtgtttgatacaagcacgacaaggtttatcaccggaacattttactttgcgttttcggcatgtttcgcatctgtccggttgttatcatacatgatcccccgcagccggagatgcagacgcattacacacttacgcgttggtagatcgtgggctggagcccgccatgatttgcaaagaagaccgcgtatagctgattttgatattgatttgatagccacatttcagtcacaagtgcgaggacgtgaacgtatggatcgggggttcaaccgaggctgcggggacatcggcctagttctccgagggcacccgccatcgaagataatcaaacatttccacctgggcatggttggataatgcaatcaggatgaggatgaattgatatctgcgtccgaagtccagtcttcccccgcgaaaaataagaggactgcctccgccgctatcttggagtcgtcatcatcatctttgccaggcacaacagagcgcctgatattttctaaatgcgaggcaagcaagtccgcaggccagtgaaattgatttgcaaattgatgacagagctcagcagtggcgaatgcatcgaattcaaaatgaccttgtaatgtgagaacgtggccgggcttgtagaggccgtggattggacagttacggctgcttccgatgttgagccatggttcaggcagcatcatcccgggaactagtgtgtcttctggtgaagatatcacggcatcaccgtggatgatctgaatgcggaatggctgttctggagtaaaccgagctagaggcgggacgttggagacgaaagctggattcaagatgatagggtgcatgccaatttcgtggccactagatgaacgttcgaccgatatcttaaatgaggatccttggggcttgtagcttttgtcacttgcgaggagagcttgagctataagttgatgtccaaagcaagatccgaaaatcctcaccataggatagtcgacatacaccttctcaatgaaagattgcaagcctagaatccagtgcaacttgtcatataatgctgctgcagcttcagtgaccaggatcgcatcgacaggatctggaaagccactgggtgcattttccgtcgacgaccaagggctgactcgtaaggactcgagatttggaaatgaccaaccaacaacgtcgaacgcagtgattctcacacctaaagatcttcggtgctggtggtattcgcttgcattgatacgatttgcggcggcagtgagaagaagtttgaattgtgagctgtacagtcctcgcttagcgtagacagggtagcaaggaatgtcagtgtcaaggacagcaatatgtataggacggacagacatgttgatcaaagcaaccagtgaaagacaacgaagaggagagagaatgttcagattaggcaaacgaacaactttccatttgtcattttgtcggataagatccgaagatgtcgggacagatggccgatctatcgaatagcatgttgttttaactaaagctctttatgatagcctttgaaattctttgattggattgaaacgctttagatgtagtagtatataatcgacgatgacagtaggttactctatacaattgagattcacacggccttaagaataccgtgagggttcgtttctttctttctttctcctcccttgttttcagtcacgcaaaacatttaaatccgcttcatactttcaatcaacgcatcgcgtgtgtcaggagtacgagtggtctctcgtatatccgcgccgagtatcatgcctgcctcttgattgcgagattcattacctgaagtctcaaatgtcttgttcgtaacgaactcatcagtgagatcatagcctgagatactaggctttgaagggtagatttgtgcaagtattcccctgcagatggccataatctttttgcctctaccttctcagcggtatcaccgagttttaggcgctttgcattcaggtaagaaatcagaaaacggaaatagacgtagctccaacacggccgtttatctgagaggattttcaacgggcggagatcaacgtgctataacactatgaccctatacccttcaattgttggtctggtcatttttgttacgagccaattcgattcagaagaaaagagtgcaattcaaaccaagttctaagtacgaagaagaaaggaaaaagagaaactatcagtgtgcgcgttcttcccttcttataccctcgcgtttgtctcgcttagttcccgtttgtcaatttgggaaggtacgaggacgtggttcctgcctcgtttggcaagtacgatctcaagtacgacccttcctggatcgtcacaattttgacttgagagagagttttcgacacaaagaggctggatcagctttgagtcaacagacgtgaggtgaaaaagtctgaaatcgtaagctgcaagatcaaaggataactataaccttagaaggtacctatataggtatgggtccgaagcctaatttggcttaatggcattgtggagaggaactttcttcccagtgagcaggagcatatatacaaaacatgtaatcccaatgttatgaaccgtcagtatgctcccagcgttagatccttaactgccttggattgtgtaaaggtctaagtcgcaatatgtgtgaaactattccccccagcatggcatataatgttggcactataataccgccttccaaatctgtccacaaaccacctcttccgccaacttaacaccgccttaaccccgatatcttcgctttctcacgcctattcacggctactggcgtctacttttgcttcgggatatccatagtccgtgatcgtcaccaacctttgcttgctgctgcctcaagccactagggaagtataaatacctggtcctcccccccaacttgctgtcttttttctttcttctccatcctagtgcaagggcttgacgcgtatcagtgaggagacatccgagatcgtgtttttgctagttgaaaactaccaacttgactgcttcaagtgagccttcgggctcgcttgggaatttttgaaacatgcttacctcaactccttgactcttgagtcctcgagttaaatcctttgaatgtgatgccatgatgggtatttgactctgtcctgagtgtgcgatcacatgccatcaggttgagatctttgttttgtttatcttcgcgtaggggattgtgtttgtatagatcgttaccataactaccggtttacttcacatattacttccttccttccctctatagtatgatgaattgaatactcttctttgaacacctgcctcagaacatgatgatctaataatctattcccatgtagtagttactaggctgcacactctataccataaccctgctatcatttgtctttcttatacaaacaaagcatgaacccacttgctttgatatctgtttacccacgagtttggtcttccctttcatcaacctcgggcaaatgaagcctagaatatccctctatttattatttgtacctgatttacctccatcacttccccgataatcagcaagaaaaactacatctacacacaagcatagtcatccatctctcaaccccaaaccatgactccaagcaatccacctcagcccaaaaagtccgctgtcaagcgaggacggcctgcaacaggctttgataaaaaccacgagtttctactgcactgccttactcaatcaggtgtccgagtcagtcatggatattcagtcccctatctctaatctctggctagcttttgctcagtttgttgcaggtcgactacgctgccgttgcaaaatgtgtgggcatctcggagagacaggcccaacgccatttttattggttgaagacgaaaatcgctagctatgggaatgctactctcacacaggctgagaagcagggtcaggggcagaatgatggccaggatggccaggatgggaacgacagctagcggctgtttctcacgtcttcgtcttgtccccctcccttagtattttcgatcattctcgccttactctcaaaggaaacagcttcgtgtgcaatcgaggatcgactagagtctgtcattgactgccacgacttagaatccacacaataaatgcacgttgttcatctttcaatttccgcattacagccctagcgtacggaaacacaagaggtcataatcctgtatgtactaagacactgttgacgacatatttaaaccgttggctagatacatgacaggaagacctccagcaaagggataacgaaacgaataatactgcctgaaatgccacactacacacccaacattaaacacagccaaggcgctcatcctattaaccgaatgagggtcctcgtgattaactatcaattaccgataaaaggaagcgggattcgagcctggtccaccctgtggctggtatgcctgatactcgcccgtgcttgcggcgggaggtggtgggctgtaggaggtatactgtggctgcgatgcaccaggtaccggcggaggctggtgcgatggaggaggttggtgggcaccgggagagctgggatacggggcttgttgctgttgttgctggaactggtgtgcgatttggggcatgctggcggcaggcgggccctgaggtgcctcatcggtggagtaggccgaaggtgagtagtcttgctgttggtgctgctggtgctggaattgctggtggccagcaggtggggcttgaccagcttgggggtacgaaatgcgctcaacaggtgaatcatagacagaggtccccaattcttgggggtgatcgtatgtagattgcggacggtggctgacaggttgataggggtcgccgtggggtggctgctgcgatgcgccggcctgagactggttgcgaggatctggggagtgagaggctgggcggtacggcatctgctcgctagtagggtatggtgcatatgcatttgccggggctggtgtggtgtctggccaagtcaagttagaactaggtgcccgtccgtatttctagattatactgaccttgaggccgaggggtgaaatatcgaggatctgcctgaggagtaggatacccagcaggcgcggcactaggataaccgtactgtggctgggcaggtcgtccatattgaggctgcgccggatgggctagcgatgcctcaaggagggactcatagtcgcgacgagccttgatgaacttttcattgagctgggtgaattcatctaaacacacgtaagccggaaatccacggtgtaacaaacgactggctgattacctttcttttgcgaatattttccaatcaattcgatgagttttggccgaatggcaagcgtagcttgatagagtgtagtaatctcttcgttctcttggacattgagatctgtattgcgggtgcttagtagagtcaggagcttctcaacactcttgatctggccaaagacgtccgcctccatttgagcctcccgctgcaactcatcgacagtggggtctgggagtttctccacatagttgagagggaaaattccggtctggcctctcagagaacccttccaccaatccttgtaaacagactccaggactgcaatggtatcgcccttgcggaattgaagctctcctggctcggacggttggaagtcgaacagcgctctcacacgcgacacggtcgctaccgatgtgcctgagagagcaggttgagtctcggcgggctccccttgggttgtggcagctgatgccgatgcaacagcagcagaaggagcctcagctcgaggtgctgccgcagaagcagccgccggtgttgctttatccttaatcgagagggccaaagccatctgcaattcctcctcctccatctgacgatcgacgtcggtgatctcacgctttccaggtttcgacggtggctgcagattcgggtctgtaatataatcagtcgcgtccggagtataggacgtagaaagatacttacttgtggtttttaatttcatgtatgcctgttccatgatgccaaaatccgggttggatgagaacatctcagtccattcttccatgcgctctagaatcttagacttgacttgttgatgcgtattctagacaaataagtggttaacacttgccatttgggaaaaaaacaaaggtttcatatatgcttacacgatcgttcgccaagcggagtagcgcatcagtgaagctcctcgaagccaactcgcgatgaatcttcagcccgcagttttgcgacaacgcatttgcaagctaggaaccagtcagctatagccataaacgagagagttttcgcgctccaaggagcacagtatccggccacgaacctccaatgtatagagctggacgttggcattccggtgagccagtcttttgatcatcgcagccacggcctctttcgcactatatcgcaacaatcagcaacgggtcgctagacgagactgagattcagagctagccacgtaccctgattcctctgcaccaactttgtcacagacatcctaaaccacaaaccccgaatcagttatgtcacaaggccggaaatgctatatggcatcatgcaacccaccagaatgaattcccagttctcggaggtcaaattctcgtccgtcgccttggctatacagagacaaatatcgtcagtaaaacacatcacacaggcagatccagcgtgtccccaggagcttttctccaagctagccagctccaggggtgcatggtgtatctgacgaagcagagaactggtgcaacttaccgacggcctcatcgaagtggttctgctgcgcgcgaaacatcgcgaatgtatctcctctaatcgtcgcaggcagtcaccgggtggtatgtgggttgtcggagaagtcgggcagcactcttcagcttctgacaagcggcttgccttgttttcacgtcgcggaagttcagcgacaggttccaattagacttgagtagctaagatcacgctcgcttgcgaaccgcggttgtgtagcccgtagcgatggtccagcttcgaatgcggggagtcgacgacaggaaaggatgcggctgggctgccggttgatgcaggtgtaaatatcacagagacagggttttggcagggatgggtatagcaagcgactggtattgcagcgctgggcatctgttaatcgggtccttggggatgatcagggacagtgttgggggtacctagttattgtgtacgggcggaactcgtcacctgagtcagcatatgacgatggagacctgcggaactgctaacttctaagttattattagcttggactgcctggattcttctatattgtgtctgcctggtcaagcttctaatttctccttcttttctgcttcttttctactccttttctgatcttttttctcacgctagttagaacttcgacatatcaatgtaggctgctacgtttcttcccacattggtttatcggctgtggctgaacatatctccactacggagtacctacggagtactttaggcacagactccctagaaatgacggagttcgaagctcattagctacttactttcaccataagctaacgacaacagaatgcgcaaatagaactacaagaaattacatagaggccaagatcaaatacagagacagtgagcggtaaagcagatatcacaggcaacgtgctcatggatggagtcattttcatcgacaatcgatgtgaagaataataaaggagtctgggtacataaaatggattccagcgacgtactgtagtgtaggtcgggatctagaagaaaaatcgggagtgacggggtatctgagcaagacgtcaagagatatcaagtacgacaaaattaaaccgaaacataggaaaaaaacaaatggggtcgttcatcagcatcctcttcaagcgcctcctttttgggctttctcttgagcgcggctgatacgagcagccttaaccaagggggcgagatgcgagagtggtgcgcagagagacatgaatgggtgctaaaaagcgaagtgtcagttatctctgcgagagcaatggaaaagaggaacgagtaagtaccttcagtaggtcatgcgccgacgcccgcttctccgggtcaaccttcagggcaaagtgaaggaattcgcggaataccggggatagattgtgctcatctttgatggtgggcgttccgttcgtagcaatcagatagagtgctcgcagcggggattctgtcaggtacggcggctcgccctcgatcatctcgatggccatgatgcctaaactccagatgtcgaccttacggccatactctttgcgagtgacaacttcgggggccatccagtacggggtaccgaccatggtattccgcttattctgcgagtcgttgatttgagcacagaaaccgaaatcggctggagattgttagcatgatttcgacacaacgacagggcgaaacttactcagcttgatgttaccatccattgccaatagaatgttgtcagatttgatatctcgatgaatgacacctttagaatgcaaatgctggaggccgctcagagtctagtcgaaatagtcagcatcccagtttcatcttgatacaagataaccattctgtactcacctctcggcaaacagctgcgatctgtccctcgctcataatgttgaaggtaaccacgtctgtcaaactgccaccttccatgtattccatcacaacccaaagatccagcccatgcaagaagctctctaaaaagttcacgatgttcttatgcttgctatctttcatgaccaagatttcgttaataatcaggtccttcttgggttgcaggtctagattcatctgcttgatagcaacgcagttgttgttaggatactcatacgctgtgtacacaccacctgaagcaccttggccgattttgttgaagttgtggtagatctgggtgggatcggcagggttgcagattagcatcaagcgtgcccgaatatccatggcgctgctctgtcgttgctggcgctgtctaggtctagcagcaggtggagcgcgcgcggtaggggacaccccagacgaaagatctggcgccggagcagtggttgatgcggaggcagctggaggctgctgtgcttgctggcgttgggtgcgattccgttccaaagtctgctgggccgcggccatgacttgctcctgttgccgctggtattgtgtaggggatgcgatgacattggggacgttggggacgctggccgtaggggtgccatttcgggaactggagcggctgcgatggggcgatgatggcaatggctcggattccgggatagtcggagtgccaaatgtaggagcgtggttctccggagcagttcgctgcggggatgtgtacgaatttgagatcgggggttgaggaggagggcgggagggggtcatcccggtaggcggtttcgggggagcacgatgcggcaccataccgctcagtggaggagatatgacaggcatgcctgccggaggtccgcgaggaattggcggaggcgatcgcggattctcgaaactgctttcgtgattttgcgggaatcgtggacttcctggtggcgatgtttgttctcgtgggctggtggcttgcgcagcttgagcagcttgcgcattgtcgaacttgtgccagacttcatcatcgctgtcgccacgggtgttcttctcgtagaatcgcatgatatccatcatagtctgcgggtgctcctcctgctccttcttcgagataccgttctcctgtagtagtcgctgccattctttgggcagaccggtgaattggccggtctgattgtcgtagccgacgtgggtaacgtggaccggattctctggagccgaaattttcatattgcgaccggggcttcccagcatactgtccacgaatctggagaagctggcctttttgctctgtctcgttcggggagccggaggattgccatcgtcggaatgctgcttgccggggttcgggggcctttcggtctcgcgatgagcgaaggaatccattcgttgcgtcagagtggtgaagctcgctgactggcgcagtgagtggcgtccgcggttatcggggctggtgtggttcgagcgcagtgcgggcttttgctgggagtgaggatcggtctcgacgctattctcatccaatgcactaagcatgccccgcgtttcgtgagggccgttcaattcatccgaactctgctcgttgtaggaaaaccggtgggaacttcgggtgcgagaccgggaggtcagattggagaagaagccacctgattcgtcgttggaaggcgatgggccgccactgttctgatccagagacgacgaggaggaacctgggaattgagcgttggattgcgatcgattatgctcgcgactaccgctgggagaggaacgtggataaacgggggcggagggggtacgtttcaacgatgtggcactctgatggctccgaagaatgcgcgaactgaagctagggggatccttgtggagtttgctagaagttcgacggaatttcaatgggaaattgtcctgattcatggtgggcggatttctgtctctacacgagacagattgaaattgggccgaggaggggtcagatgcagttgttttatttttctggaccaaccaagttcacggacctgaggggaatttatggtccgcggagaataaccgggtccccgaaggttcttgacgatggatggaatggaagattggaagggaagtctgaagagaggaggtttagcacgtggagtgggaaaaggagtcgggggtggctgggcggtttgacaggttgaagggtatagggagatctaacaacatctaaagtcgactctatcagaccgagtcagagacacttacagtcctcatttaggatgttataagaatagaacgaccatagagtctcagatttctacggagtaccccgtttattattccttacacttaacggcttctatacagatccactatctttaaataactaaatattaattgtacctttctggacctccccaatacaccacggagtactagctctccagcaaacagaccagaagtacctatcactccccttttgcccctggcaggtagccgaatacgtcctaaaagggttcaaccgccccgggttggacgggtcaagtgtgacagatgcaagccaatatcactcggcacattggaatccctgggcattgggcatccttagccctagaagaacaaaagcacagtcgcacagatccctcctgagcaattaattacaacagacggccattgtaaccgatttgctgagccaccggcttcgggccatttttcttccatatgcgccaccgttggttaccttcgatatctcgtttgcacctcacacgttgggcaaacactaggttgattagagtccgtttacacgggttctactatcctcctccatttccccattccatttgactcggatcggtatataccactttccatgatgtggctttagcgttccccatattagtttcagatattaccggtggtgagatcgaatgagacgtggtccgggctctaagggcctttttcaactggccaacttccatgcgaagattgaccattatctaaacatcctcttcacctcactgtcgttggtccagtcaagcggggtctgagatttggcctaaaaccggaccgtacggtattgacagaggctgatcgcatgactttcatggagctttctgcgcattctcatctcactttaataggttgactttgatatctgccctcgggaattacaaaaaaaaattagagatccacagtaacatatatggccacgcaagctagccccataggagcatatatttatagcgagcaatatcaggaaagattgttcaccattatcattctttgattcatacaaatagtatcgggaattcaggtctacaatatatcagcaaaaacatggtctatttggttaacaaaggttgtcgatccaataatctctctaaacacttccccactatcttcaccactttcaatcagctctgtatactccaatatctgcgaccgtcattcaccccctaaacggatggaaatagtgatatgaaagagttgtgtgaatgggcccgacgtactaactcctcattgcggaaatcaggtcatagtgcaaagggaaggaggcggaaacatgcctgttccgttttgaaatggtcccgacatacagattcactacagaggcgcgcaggaacaagtccactgtcgttcatggttattctcatgtgcgtagaagaacagccttcgaatttcggggttaagattcaccgtccggtttagagctgtaaatagtagaaccgctgggatgtaccctcttcatggggcacactagcaaacatctagtatctggcaaacgcctcctgatcatataagacatctagatcaggcgaataaagcagtcttgcagtacagcagccgtgttaaggtctgcatcggtaaatagcggtgcaggtagaaaatggtaaatcaggagtgtagctgggtagtactcaatagcatacgcttgatcggagggttttctaaatcactgatagagtagggaacaattggcgagggtaagaataccttgcctgccctagtatgtgattcaactctagaaatgtggtttgtatgtttgacgttagctgaagtgaagtctagcttttcaaggatagtagatatatcacagatatttacttgtactcaatctccttacgtggtatactatgtaaacatggttatcatagtacagtctctgtaaatctcctcggatatgactcgaaaatcagaaggctgtaaagatttctcacgtagcgaccactcgagccttcctcttgtttacttcaactattcttctcacacacttctcccctccacctttcttcacttcagtttactcttctatcaagctacagcctctgtatcacacacagtctagtttacacttcatctgtttgggctctagactcttaacgatttcagcgacacccagcgtggcgacttgtctttttgggcagtctcttgtctggcttgtcacgcatctgctgcaatacttgagttcacatttttttttcacttgcgtaagtctatttttttcactggtcttttcatctgaatcctaacttctcttcattacgtttattgaccatcgcattatccaggtactttcctttcctataaaacacagcattatggagggaattacatccgaggctgccacattcagctatttgttcttgtccggtgatgaaacatgtaaggcaacggacctcgctgcatttcttcctcggtggcttagcgaggtcaatgagaataggctgattcccccgggtatcccagagctactaactcatcttttactcccatttggaacacgtgatatcctggaacacatcgcgaagctccgaatccctgactctttgaccgatgtacagaagtggatggtaaaacttcaagtccttgtggataacaaagcacacgaaaggctgctgcagaagttggaatctatcccggatcaaatgatatcattcgaagatatctgtggacaatctaacagtaaggacattgtttgatccgaacctctggaaatgatattgacatacgaaaactcaagcagctaggacgaatgataacctcgccgttgaccctaggcgcaacctccggtttgaccatgacatacgagatgtgatgattcggggcgacaaagacgaaatgagacagtatcaagacgtcttttacgggactggctccgttgcctggatggttcgatctccttactggaatatcgccttggccactgacgatgaaggtattcgacttctcccggataatgtcttggacagagtccttcccaaatggagacaaattctcaccggggagacgatcccgaccccgaaatatggcgttatcgattcttttcgcgcgtggttggctagtgaggagaaaaaggccagtgatctcggcaaaccttggcccaaaacccccgtcattcccgtctcttcagccccgaagcccaagtttgtaagtcccaagactccggatcgatctcgccttcgcgccatgaattcgagtcgtttctctccatttgaatctagccccaatgcccccaacaatgagcaaactgaattgctccgagacatactcacggaacttaaagacttgaaaaatatgattagccaaaatatcggaaggaagcaagagtgcgagattgcaggaaaccaaccgtatggatcttggcaacagagcttccatcccattccttccatgcctcaaggaatgcaaccaaattatctcgtgccgcaacaaagtccattcgtcggtgctcaatatctacctccccttcctcacccggagtgggaacgctggaactcccagtaccaaggcccggctaccatgcccgacccgggacctggttcagcttctcatccctaagcctgcccataaccaaggaaggggagacattcatgtacgatttgatgtggggctctttgaccccaatcactacagagagagttgaaagtgaggatgagacggtacgtagatgagcagctgttgctatgttttatgttggacattgaggactacacctcctcgctgtatcatgtcagattcacaagtatgcgtgtctgttaggttcaatcaatcgaactcaacttcagtctattgctggtcgtatgggactgatcccccccgcttttagtgaagagagttgaccatctgcacagtgacgaatccgcatgacaaccaactctttagcttctttcaatctcaaatatcagtggagctaggctgatcttacgcacagatccttctcagatgattggcttaatatcgtccgcagtcggtccacatgggtgcagatcatcccggagtaaacaaagatcaaatcacgcaagttagtgggatatgatgtatcccaaattttatttcgctgaagatatcaatgaacagaaggtgaaatggaaattgcaaaatcaacttcactaaaattcactagtgtcaagggtaggtgctctctcccttgctgatgagaatgtggaaccacgcacttgcgaataacacgtcccgttcctgccgagagacctttagcttctagaccttgagggcggaagatcatcggtgtaactcatgtgggggatatgcagaagattcaatggagtctaaacgcaacgtgtattgactgtgccttccacaatgcgagacatcacatagattcagacaaaatccagagttagttacagtaagcagatgctgtaagcatcaaggtagctcttttgcagagaccactttttattttgatgatctaccgatcagtaattagcgcatccctttgggcgccgactccagttagactggactcaataccgacatgcgccttacatcgcccagataagatgtacaggggttaacagtcggtgattggattagctgtcaatatgcgaaatgggcatacttcgggacctaacctgggggagctgcgaatggtgtagaccggatcaacataaattggacgtgattcctccttcccagggtgatttttattcacagcccgattcccccttctgtctatacatcatgtttggtctcattccgctgctatttgctgcactcgccagcgcataccctaacaggggcccttgcacaggcgactgttgggctcatgacccagccatgatccagcgtgtgtcggatgggaaatactaccgcttttcgacgggcaccggtgtcagcattcatagctcgccgtccgtgaagggtccatggacggaccttggctcggcgttgccagatgggtctaagattaccctcgatggtgtggacagcaagaatatctgggtaagaatgacctgaaaacgcaactgggaacaatatcaaggccaatggctaacatgattcaccttataggcccctgatgtccactaccagaacgaccagtactacatgtactatgtcctgtcacagatcggcacccagaactcacagatcggtgtcgcaacatccaagaccatggatccagggagctggacagaccatggctccgttggtctccctgcaaacgacaactacaaccgtatcgatcccgcctggatcagcatcggcggcaagaactatatgaactttggttccttctggggcgatatcttccaggtccagatggacactcctctgcaagttggcggcgcaactccctatcaaatctcgtggaacgctactctcaaccaccgcgaggagggttcatacgagttcaagcacggcgactactactacctgctctactctgctggtattgcgggcaagtacacaaagacattcccagctgagggtgccgagtaccacattcgtgtttgccgatccaagaccggtcttggtgactttgtatgtttcccgtctttgttcattcgtcaagacacgttctaacatttgagttacaggttgatgcagatggaaagtcctgcaaggagactggaggcaccatgctcctcgcaagccacggccaggtatttggacccggcggccctggtgttgtcaatgacaaggacctcggtgtggtcatgtactaccactactacccccttgccaccaagcagagcaccgatgtctccgacaacgcgaactataggtacgcctggaacgttctcggctggaaggacggatggcctttcgtcaaggccacttaatgcacatacttttcgtggggagcccgcggggctgatacatatctttttacattcttctcttgtcgatgattgggctcatatacttttggggggtattgacttgtttattcgatacccataccttcttgatatctgtcatgatgcacttcctctgtgtctggcaactcttaattatataatattggtcctattcttattcatatgggtcaatttcggcattgcccgacccacatgaagcattctacaaggacataatttacctatgcgctgagacaagtctataaattctcgctacatttggatctactctaaactactagcctaagcgactaacttggaaaacctgtttgaagacctgcatgcttagccccggtgcttccaccccattttctacaagaaagtgaacacaaacttgttcgattttggttcaagctttccttccttgagcggttgaatcaacatgtctattgcagcccttcctgtagacgcaatggtcgcaatctgtgatcatctagaactgtcatattattttgcactaagacttacctgccgagcaacatacaataacacaatagagatatctgcaaggcggtgctacaccagtatctctttgcttctcacgagtgacagtctctgtcggctagaagagatcgctgctgatgatattcttcgaacattcgttcagacaatttggattgtgccagccctattcgaaggcaaggagaaaatgacagattcccgcttcgcgcattccaagtttgggaatggggcagggaagggttggaaggggaatgcggctgagctccaggctcgctatatcgcatttcaggctatagaagaggaccaccgcgccatatcaaagtcctctgccctcagagataccctagatagatgcctgccacggtttgaaaatgcggtcgtctttggtctgcagtcttatccgatggaacgtctcctcaatctagaaaaaggaagctatattcgttgcctcggcctacccgaattgaggaatcaactgagttgcactgggagaccgtcaacgtggttcgatggatgttacctaccagtaatgggcaatgcgcatgcctttgctttttccgctcttgtggaaacaattatcaactccaaccgagaagttctcgcactacacacatgtcgcggatattactgtggaatgacaatgcgaaaccttcaactgacggagtcacaatacaaactcttgctacccctcctacgggaattagaatgccttcatatgtgtctccgtctcccgaggaaacaagaggatctcgataaaagtggcttctgtttccttcttgatatccttgttgctgtagcaccaacgcttaagacgctggtgttttctcaatggcacccaaaatatgaactgaacccacgatactttgaagaattatcccggggtctccacttctcgcagctccaggatcttagccttcagtcgattgaagtcacagtcaatactctcaaggcgtttctacagagcgcggctgcgactttacggcgaatgactctgaagtcagtagggttaagagatccaatcacctcagcgccagatctaggacctatggaccgagaaagtcgaatagtaaacccgagacagaaatctccgcttgttataatgccgagacggcgactgtttcatttgatacctggatccaacagcgtcgactagagatgtcgacatggtgcccattcgatttaccggggacgaattatggtaagtcatccagctatgactagaagcttctgttaacctttgacaagaaccgagagttgggtcagatggattggctgagaaaccagttggcttcgcatgtttccctagacgcgacaaatctcgaaaataagtctaaaattattatatatgacatgtagttcaatgccgttgaatatcacgatccccatataaatgtagccacagtgacgtgcatcatcaattggccacttgccgccacgtgcgaaatccaatcctgggatataaaatctaaatctaaagttacgaagtgattgattcacctgggcatttgagattgcttatacaatgcttgattggatttcggatggcgttataacacgtatccgaatgagagcgaagaacagctaagctattattgttgtatctcaaattcacctgcgcaaatccaagatcaataactattcattatcaattcctaaagaaaagagcccaaggcgtgaaaaggtgcaaaagtgtaggcgcgggctcggagaaaacatccccggagattcgagctggccttttcctgtactttctggattgtccggggttctcgacctttctctcacctctcacctccacctccacctctcacctcctcttcttctctcacctctcttcctcttttctttcaggtggctcctctcttgagcccctgtatctttcttttttgattctccgcgcttcgtcggtccaaattgctattgcattttcctgaattgcatccgcatctcctgaaaagaaaccctatatatcctactcaattacgaaagaaaaggatatacttttgcctgtaagttattcccaagtccttgtcatgccattgattgcacccggggtttacggtgatctgtcctgatctgtcttgatccatcgttattgcatactgacccggcccgtcttgattgcagcatttcgtgcatagcccatttatcaaccttgtctccaaccccgatttactccgtcaacccccattactcctaatggctcttgaaacacctaccactgccaacggcggatccctcgctgccatgttggaacagcagcacgcccgcgacgagttgcacaagcccactgtggaggaaattgtggacgaggaggacctcaaacaccaccctccgacctcactggagcccctcctcgtcgatgccgacacacctgagcctacccccctcgccaaaaccgcttccccggtgcctgcacccaagcccgctaccaaaaaggccccgacattcgatgttcaatccgaagaattgttcccggctttgggcagcggtccgaagcctgctgcccccgccgccgctacatggggtgcgaagaaaccttctgcggcctctgctgtcgcaaatggcttgcccgcgaagtcaatgggtacgtggattattttggaccttccggattggactttttttgacaaatgaacagagatcccccgtgtcatggcccttcccggaaagcacatggagcaactccgcctagcaccctcccagatgcaaccccgtggccagatgaagaagcctcttcgtgatatcctccgggatatctcccgcaggtcaaaggccaatgttgatatgcgtggtggccctggtggctccatcattttcgaaggaaagggctccgtagatgcggtgcgccaggctctccgcgaggtggcccagcaggttggatctaaggtatgtgtcttagacgtgccggaaacgagtgtctaggctgaccaattcgtcctaacagcaatccgtccgtgttcccattcccacatctgcacgcgctcacatcattggccgtcaaggtaccgttgtgcaggatatccagactcgcaccggtgcccgtgttcaggtcccccgtgccgaccccaacgctgccggtgccgacgacgatgatgatgataccattgatattttgattgagggagatgccgtggccgcggagatggcccgccgcgagatcgaggcgattgtcaaggagcgcggctccaacatgagcttccgattgaagactgtccctcctgaattcttccccttcattgcaggtgcacatgacgccaacgtgcgggccattgaagagcgcacaaaagcgcagatcaacgttccgcgctatgatacctggtcaagtcagccccctcctcaggaagccaaccctggccaggttcagtttgtgcctgtgcctgataagcacattttgatttccggagaacgggctgccgcacaggaggctcgtgctgagattgagcgcttggctgctcaattgcatcagcagcttacactgcgccagctggctatcaatcgtggccagcaccagttcattctgggtaatgaggccgacgctctgcacgacttcgttgcacagactggatgtgccattgttctcccaccttcttccgatgagagtgagttcctcaccatcaccggtccccttgacaaaatcgaggctggtattgaacacgctatggatcttgcgacaagcatgcagatggctagcattgatctgtcccgccagcatcccaatgctcccgccggtcccaatgcccacgcgagcgctctctcgcagtacctccgtcgccgccaggtcgttaaggaactcgaatcgacctacgatgcgcacattgcacttcctcccagcgttggtggacccgtcacttgggaggtgtactcccgtgacggcaagaataccattcgtgcccgttctgatatcatgaacctagtccaggctctccccccctctaaactccgccacgtccctgttgacccatacttccaccagtacctgcgcgacaagagcgcaagtgcccttcagggtgactttggtgtccaccttatggtgccggatgacatcaactgccccgaggttgttcttgtttatgaaggcccctccgcaactgcctcgcgctttgaagtccccagacagcgcccctcacccgcagatgttgcagccttcgagaagggtctgcaggaggcccaggaattcctcctgagtgccctcggagaccagaatgacattgttgccaagacggtctccgttcctggcaaataccaggagaaggcgcgtaaattcatcacccgcgagcaggaggccaagggcgaggacagcatccctgtgcgtgccattgttggcgacgtcaagggttctcaatgcgagatttcgcttcgtggtccctcggcccgtgtggctgaacttgtcgccaagctggaggctttcgtcgtcgagcaggagaaggacgatctcgagcgtggttacaccactaccttcgacttcccccagaagtacgccaacttcctgattggcaagcgtggtgaaaacatcaacaagctccgcgaggagttcgatgttgatatcaaggtggagaacgggaaggtcgaggtcaagggacccaaggccaaggcggatgctacccgcatgcgcatcatcaacatgggcaagaagttggaagatgagactactcacattctcaaggtccccgcccaataccaccgtgagttgatcggccagcgtggaaaccaggtcaaccgtcttcaggatcgttactccgtccgcgtccagttccctcgcgcaactgttgccaatgacgatttgacggaaactggcagcgatgctggtgctcgtccccaacgtgctcagcaggctcccgatgaggtcctcgtcaagggccccagcaagggtgctgacttggctcgtgatgagattcttagcttgttgcagtatgtcattgagcacggtcattctgccaccatctctgtggcccagagtcaggtcgcatccttgatcggccagcgcggccgtgagatggacaagcttcgcgctgataccggtgcccagattgatgttcccaacgccaacgatgcgccggatgcgtcgggccgcgtggagattcgtgtcaagggtaccaagcagcaagttgctgaagccaagaagatcttgcagcagcgggccagcgagttcgatgcgactgtggttaagaccattgaggttgacaagaagtaccacaaggctttgattggtggaggcggtatgttttcatgcaaagtgatacgtctattttcaattactgacttaacataggtgccaacatccgcaagattgtcaccgaggctggtggccctactgacggcagcgccgccagaatggtccgtttcccccgtcccgagagcaccgaatcgaccatccgccttgagggcaacggcaagatcgtggataacatcatcgccgcgatcgaagagttcgtcaaggaacgccaggaccaggtcacggagatcatcgacatccccaccgcccagcaccgcatgctcatcggccgtggcggcgagacccgccgtggcattgagtccaagtttaatgtcacccttgatatccccaagcagggctctggccgtaccgatgtgaaactcaagggccccagcagcgccgtcgaaagcgccaaggagcacgtcaagtccatgctgaaggagcagcacgcggagaccatcgaggtccccagccacttgcaccacgtcctcgccgacaatggccacatcttccgtcgtctgcgcaacgactaccaggtcaccgtcgaccacgccggtcaacctgttcccgtacctgccccctccgccgccgaggacactcgcaccacagctgaaggcaccgacatgcccctgatcattgatgaccccaacacaaccaccgatgcacactcctggaccgttgtggacaacaacacatcagaagtcgcctccacccccttcccttgggttctcagcggcaccccggagaacgtggccaaggcccgcgccgtcatcgagaaggctcttgcctccgcatccgagcagtccattacaggctacctgatcctgccggaccccaagacctaccgctttgtcgttggtcagggcggcagccagatcaacgccatccgcaagaagacaggatgccgtatcaatgtgcccaaggaccaggctcgcggtgaagcgattgagatccggggtagctccagcggcctggaagaggccaaggagatgattctagaggccgtgcagaatggccttcaaggcgctgcgcggtgagtggttctggcttgttattgcgacagtggttttcgatctgacatataaaaccgactcttacaccacccctctctgctttgaattcgagcgagcgggaacaatatcattttagttgtattcttttggcttcttcaattcttgttttcatctttttttggtatctatttcatgaatattggttttttaaaaaggattctctctggtcttgctttcgcatttattgcttttggcctttctcatcctactgtgccttcttttcttgtagctacttccccagatctattcggattgttctacgagttgatagacctgtcgattctttgtgaaagtgacgagagcgttgactgcccaggtggctttccaatctaaatgatttcactctatcatgaatgaattggagatctgtatacctaatttagcttaggacatgctatggtatagatccgaatgcagattgcttactagaagaggaacccgatcgaacgctgtcgaacagcctcggacctaatatcctctcgtctccgtattagaaatcaccttcggaggaactaatgttggagatgcattagagatgaggggacgtcaggatcgtcgctccaaaaggagttaaggactccgggcggatctgccatgtcatcgtgatttgttggttgtacatatcccagcgaggtaactatatgttgacattcatttccataacaattcggttccgaaaactaaagattaatccaataaagtatgtcgatacatatgaatagataaaaaaggtaatataaaataaaaaaaagagttggggtactcataaggccccaactcgaaaaaaaaacgctctctttgctcttttagccatagcgactcggactcccatccgtatggaagacgggtatttaaatctcagattcttcattctgaccacacacaaccccactcgctagtcccacagtcaatcatctaattgcataacgaacgccccggccagtctactgctgagcctgttgagcctgctgggcctggaggtagttgtatgcgccgtatgcgatagcaccaccgacgaggaagacggcgtagaggccgacgccgaagccggaggcggaggaggaagacgaggagtctgtgctgctgctgggcttggccttgggcgaggggtcaccgggctattttttcgacggtgttagtattgcgtgtgacttttgtgtagatggggaaatatggggtgtggggggaaggatgtatgtaagaaggggtgcgtaccaggcgcttcacgttgccgacaaacatgccgtcgtcgaggagtgcgcgcgcctcatcactgtggccgacgtcgtcgaaggcttcggtgcagtcttggccggcgagatcgaggaggacttcctcaccgccactgttggattggttagcctggtggttctggggtttgatgtgggtcggtgaagcaatgcgagacgagtgaagacaataggttgaggtggccttttttttttttcgctcttctcttctactctcgctagcgcttgttctttggcttcgggtattgggattctagattcggcagtgatagatatggagacaacgtacgggtgttcattggcgaatgtggtgcaatcgtagaccttgtcgttgatgatcaggtagaggtccttcttggtgctgtgctcggcgacctcctgcaaggtgagttccttggcttcagacatgatgaattgaggtatctggaatgatattcccgttgtcagtcggggttctgtataaaaaccgggcaagtgaagaggggaatgtgttgagtggagttggcgataggagaaaaccccgagaaatgttggggcggagataggaaaccacttacggggtatggggaagtgataagtccaaaaagcagccagagtaccgagaaggagaagagaagaggagagaagaggagggagaggaattgacgaccaagacagaatcagcgagaaaaagaacaacagatgtcgctggtacgtgcggctgggcggtctcgttcgtgtggggcccaggcactggactttggggatgccgtgaattacagccggcttataagaggagtcaggcaaaaggggcgtttatcattggatggcttcgatgagtttctattactctctatctttgtcgccggtcccgatagttagttctgaattgagtctacactctatgtatattgcgctagataggatctggggtctgacgaatcaggggctgcttattagagtacatgaagaggagatctggccttgggctgtgtatagttagttagttagtatcaaattgtactgtagcatagcatagttaactggtacaagtacattaatcgtatgtacagtaacatgtatgaactcaccataacctcggggatcgattctcgggtagcaccgacgggagagcgttccgctgggcggaattaagtactagcacacttgctgttgtataaatatcataatactatgtgcataataatatacctctatccaatcgtcatcatgacatgctagaaatcaaaacgctcatttcgctggaactcgctcataaaacacaatgtacgcctgctcgttctgtaatcggtcccgcgtccgaagctcgcgcggattgaagttcgtggctcggtcgtcatcgaatttccgccagcattgccgctccgcatcacggaccagcgagatgtagtgtccgctgcccatcgaagacccgagatgccgtagcaccgcaaacgcatcgtaattgaacggtggaaccgtggccccggtggcgggcggcatgccgggctccggagggggaggatgagggtgagcaatcacaaaatcgtccatgcggagaccgtaaagcgggaaatcgatgggggtgtggatcttccgtgcgctttgggtcttggatgcagaaaagcgcttgaagtggacaacgagaatctggggcgctcgcgtgatgatgatctgcttggtcgccattcgcttgcatttacaaaatggacacttccagacctcgtcgccactcagcatctcctcctggcagtagctacggaggcactgatagatatcacctgcacctgtcggtgggatttccacactgatactgtagaatgcttcatatgtagtggatgtttgctggcaggtcgtgcagcgtagtcgactggcatgttgtccggcaaacagtgacgagataaaagactcctctcggtggcagtatcggtcccattcaattcgggaaaccttggtcattggcattcgctctcgttgcatctcctccgaaaatgtcaaaggtcgaagcggtgttcgctgccagttgatattgagatcctcgtggaggcaatcgaccacaaaatcgaagaattctttggcatcttgctgccgctcaatggcccattctcgattcaagcgtccacagaagttccggaacgaggtcggcatgatgacctcgacatcgttcttccacagtgaccggatcaggttcgcataaagtccaggcataacgccctgagatcccttccaatttttttgtacataataccgaaatcggttgtcgatgaagaacctactcagtggaatcgtggcacttaggcattgaagggtggaattcatgtaacacgtcacaccgaaattggtcaatccagtctgcggaagcttgaggcgatctaggcgggagcttggagtgtacagggctgttcgattcgccgagttctgacgttgcaaatggggttggatctgccgcccatcggagacaccgctatagctgggacggggcacagcagggggtggtcgagagggagccactgacatgtgtgcagcataattcggagtagcactaaggggagggcgggaatccgcgtgtgtcatggactgttgaatatcgtgcggttcgggaaaacgacgtaggaaagcctcatatgtgttgacgaatggggttgaaggttctgatccagtctcctcgggttcttccgtcagcgattcttcctcggcataggtgctcgtgtcgatctcctcgactttagatttctccatccactcagataattccttcgaattcaaaggagtgaactcgcgcagtcgtctcttccgaatttcgagacttgagttggcactagccatggtaggcactctcccgaggggccgaccaggtctagatacgggctttctggcctgcagagaactcatggccgcagcagttgaggacgtcgcaagagattgttgtcctaaaagatcgatccaggcatccaatccaccaactaggagagccggaggccgtcccgccttcagaggcttatatgcattgaactcatagagagtatcgtagagagccctcaaatggggtgctgaagtccccaccggtgagccagcgagatagctgacggaatcggcgctttggtcatagtaaaccacaaggtcgtactcgttccgtttctcaaataatgcctgttcatgctccggtgaaacaacgagacgctcctctagttcttccgctgacacattctccttcagaaccacaggttctatgcaaataatagattttgcatatacatgaccattatcgtactggtctcgaggccgaacatcgattagcagaacattaaatttccgcagattatcaaggaggctctgtgcagttatagttgtgctgtacggcaaatcaggtgagttgctccgagtttctcgcgccgagtccaacccattgggcgtcagggacctatacggattgtcgtcaaagcctccccgcgttggactgacccgtggtgagttgctgaattgcgagtatcttggattggttgagtgtgtgctctctgttgaccttctcggtgggttggatgtgggttttgatggcacggtgaagacagggctgtaagccgggtcgggagcacgtggtaacgatgtgttaagaggaagcttcggtggaatggttggtaaattagatgaagagcccatgacccgaggtcccaatggccgtcttggcggtggagagttgtagttcgatgaataaagtggaatttgcccagcagatcctacaattgggcttcccagccgagtagtacttgctcccaacccatgctggttggaaggaggagacgccttgagtttggcaaatcgttgcgcaagtgtgtcatctgcaggactggaaaacctctgcaaatttacctccgtctcgggcactctttgatactgagttggacttggcattctagcgaagtttgttccagactcttgattctcacggccccgtggcgtgacagaaatttgttttggggatctggatgtatatataccggttggctgcatgccactgaccaaattatcctcgatgatttcccgcttgatcgcatccatagtgccttgtttggaccgcaccgccttcactagatcggcgaactccttgtaccaatcagggcgttggctgacggtgcgatagtctggatgatggggaatgagattgatagtgatttcagaggcacgaaggtactgaacgtaggctttatcgttgtattcgtcgtctgagaggttcttggcctttgcgattgcatcggcagccgttggcaagaggatatcaagctatgatcccggttagaggaaataattcacacaattgtcagaagtgcgcatataccggtgtagtctcgttaacattcaacgcagcagcttggtcttgtaggtctttgatattggggaaccgaggtcgccgtggtgggacgagaggggccttgcccttgggatacgaatctggtcgggtgactcgtccgttgggatccatgtcgttccccatgtcgttccccaccgagtaaggacgccggttgtccttccacggtggtatttttgggggagatggcaaagtcgccgcatcggaggacatggtagatccaggcagcgacaagcggacttagcgcatggttatgtccaagattaggaaaacaaagagagtaaagccaaaagacaggcgtacccaatccgccgaataattgatcaagtccaaataacaaacacaaataacgaaagacagaccagagtaaagaggacagatccagggacaatgcgggatgcctctggggtaatcagatgacagtacttcaccgccctcagcctatgacgccaggggcttagtcactactgaggtgcctggaagctcctcctccaacttgccagtctgatcttcatatttgctagattaagtgtcttggctatctgcaacgctactgtgatctgagtcccctccaaattagacgtgcatcgggtgtttcgccttcgccatggcaggctggttctcttcaacctcgccgctcgatgagcaaatcgagcgggcgacagcttcctccttgtgagttttgattgccgcgttgttatcatacctatatgaaccggggctacctaccaggatgctctgaaatgaatgatcgcgtggctaactcactctcagggaagacattgccctcaacctggagatatcagatatgattcgatcaaagagcgttcagcccaaggatggaatgaggtctttgaaacgacgactcgagaataagaatcccaacatccagctggcgacactgaaggtgaaacatttattcccgtgagactaggcttggaacaagcgctgataagcccgcccctctagttaacggatacttgtgtcaaaaacggaggaacacatttcctggccgagatcgcgtctcgagaattcatggataaccttgtctcattgcttaaatccgaaggcgctcctcttaatgccgaggtgcagggcaagatattggaacttatccagaattgggctatggctgcacaaggccgtatggatttgatgtatttgggagagacatatcgcaaattggagagtgaaggataccggtttccaccaaagaccgaaatgagcggcagtatgctggaaagcagcgcagtgagtgtgcctcaaacccttccgttgcagaagctaatttgtgaatctgtctcagcctccagagtggatcgactctgaagtctgtatgcgatgtcggactgccttcagttttatgaatcgcaaacaccactgccgtaactgcggcaacgtgttcgacgctcagtgttcaagcaagaccattcctttaccgcatcttggaattctgcagcccgtcagagtagacgatggatgctatgccaaattgacctccaagtcatttgcgccaccgggaatttcggatcggtccgcgttcaaaaacaactccatcagcaaatctaacacgatggaacctcgtgctggtaaaccggacacagggttcgatgaggatgtgcgtcgagcgttgcaaatgagtctcgatgaagccgagggcagaggtccttccgggtttgtaccgcagacaggcaacgctccagaaccggccaaggctgttccaaagccggagaatgtggacgaggaagatccggatctcaaggctgcgattgaagcatccctgcgtgatatggaacaacacaagcaaaaccatgcggccgcattgaagaacgtgcccacttcaaattccaccttgcgcgattcctcgagcacgcccactcaattgcctaaaaatccgtacgaactaacccctgttgaaaccgagaatattcatctcttctctacactggttgatcggctccagcatcagccgccgggcacaattcttagagagccgcagatccaggagctatacgagagtatcggtgcgcttcgaccaaagctggcacgaagctatggagagaccatgagtaaacatggtgagttcagctgtctttatttatagaactgcaagctaatcctcacagatacattattggacctccatgccaagctctctacggttgtacgctactacgatcggatgctagaagagcgtctgaccagagcctattcccaacacaatcttggtcatggagctgttcctgggggcgcgcagtatccaaatcttcagccagccttctctaatcacgctcccgacgtccagagtggagccgagaatttctattatggaactcaaatggacagctctcgcccacctactactatgtatgctccgcagcaggtgaacggcgatgggttccaagttccatccacctacccatcacaagctcaacatggtgccccgacaaatgagtcttacggtcagaattggggtggaaatacctacccggcccttggatcacctccacctagcaatggcattccaaataactatgccaatgccccaacgcccagtgccccggctcaatattacgcagcaccacacgaccaagacacagccaggtcacccggcgcagaatccccataccagccgtcgcccattatgcgccgggactcctctcagtatcaggccggtgcaactcccagcggtccaacccctgctcccgaacaacacgcatctgccgggtatgtgcaatcgccgggctattctgtgccacccactgcgccagcacttcatcagcaggcaacgggcccttctcagtcttactattacccgtcacaaccccagcctcaacaacctcctaatgctgtgtcatctgcataccctccgattaacgctggacaaccggggtcgtatggacaggaaacttcgcaaccgccttatcagcaaccagcacggcccgtggaggaaaacctgattgagctatagcgtcattatacttcgttcggcgttatctatgttttcatattttgcgtttttttttcgcctcatgatacctgaagacttttagcagattgaatgtgtagcttgaagtgggtgaatgaagggatctcaagtatacacgaaaagacactgcctattgccagtggctaatgctgccaatagttatttccaatatcctctagagctctctacattcttaagagtgcattttaaattatttatgtagctgggagacgacctggattgttccatttatagaagagcctcgccgctgccttaggcattccacaatattgttaccgctctttaatcgccgaagacagcgacctcgctctccctcttcttcactactctaatttgccccggatttctctcctgctcttattcttttcgcattccatttgatttttcgttcattattagcggttcgaaccggtgtaacccggctttcagcttttgagtcttgattgctttttgcctgcatgccctctaatctgccgtgagacctcttgaacgacttgcctcggccaatcgccacactctatgctctgtgaccaccgctgattacccgcctgtggctcctctggggtctttttgcttaccgccatgcctacctctaacgcttcaaatacctcttcccctgttaagcgccccggcctcggtcgccgtgcagtgtcctcccatgcagttgtcacgcgcagcgccaatcctaatgacctgtcggtgtctcacacgcagaaagcacccctacatcataaacctcaccgcacccatgttgttggagctcaccgtaatcaccaccgcaacccctctaccggcaaaaacttcaacaaactccaacgtctccaagtagcagctcccgagactggtgggcggcaccatcagcgcaagaagtcagcccccgcaaccccgatcgcgagtccaaaggaaagcgggcacgttcgctgggatccggttgtaaatgaccatacaaccgatccttccatgaagcgaaacttttccactcctgtgttgcgacggaatccatcagccgttgggaagaaagcgttggtgactgagcgaccgccctccagcgcgttaaagaaaaagtcggtcggctttgagctgggggatgacgagactgacgacgctgagtgggaagataccacgcagtcacccgaaagtacgaggcgcaactcggtggcaccatccaatcccagcgcagacaatagtaccgttcttgtcgaccaccttaccttcgtcaagcgaccatatccccaaatgcctcgagcgaccagtctgcccgagtcgatcaccaccaagtttgtccgagagcgtactgaactgcatgaggatgaggttgcggatgaggaagccgagcagcacgatgaggaagaagaagccgaggagtccagtcagcacacggagcagggcgacatagcagcccggctgctaagtcctacgcactcatccaaagcgccccctgccatgtcttctatctcggctatggtgaagccggaagccaatagtctcaataccccgtcgcgtagtagcgcatctctcaacctggctgctggccaggacaacgctcggcgcacattgtcgtcaaccagcatggccagcatgccgggctctcaaccccaagctacctcatcctctatggaaggtggagtctccaggttcattttggacaacaagaatagcgttgaggaatcttctcgcaacgattcggacccgaatactccctcgtcgttcctcccacactaccaccccgacacaccgccctctccaaccagtgcagcggccaagatgatcgcgtctcctgcgcggccgcgtggtgctgacctgccttctcgcacgcaacagaagctctggctgcagcgtaccgctaccctgaataactcacctcctgataaccatggagtgaccgcagcagttccgccgtctaccattgacccgacatttatcgccgctaaccacagcacgtatgacgccgccagggggctcaacggtgacggccgagctggcggtgcaggacatgacagcgaaacccgtcatatccgcaaggcgtatgagaagacatccctagaactaatggtcgtgcgacgtttccagtctcccaccggtcagagcttcgctcgtcttcgtcatatcgtcagagccaagaaagcggagcaaggatcagctcttatcaaagcagtccaatcagcaccttcgctgtcccttttgcagcaaagcaagcagcccactcgtcttagcaccagccctacatctaaatcccagccgcgtaatccaacccgcactgcatctgaagatccagcgacaaataacgaacatcccaataccgcaaatgctaccaaggccaacgacccatcccaccgcatcttctccacctcaaccgaagcttcacgtggcccaaatggtgacaacgacgaaggatttgagcttaacgacagcgccatgttgatccgccggatgtgggagagccgagaggtcgccatccacggctaatttatgatttgtttcaccccttttatgtttatgacggttcactctatggttgttcggcgctcgcattctgtttttttttttatcacagcgatcaggttgaacataatttatccttgttctttttgctttcctgccctgcacctctattatgttgatatgagtagccaatgccacgaatttccatggtaatcacaacccacacagcccactaagcccactaatgtcccttgtcgatccaaaacaaatcggccgcctgggagtggcctggtcggctgttgtccttgcaccggctgctctgacttccggggaagggctgcatggcctgacctgctgattaatcgccaatcccgctctcctgatttgccctacaaaaccctaactagatggcctcatactccagacttcttcagacttctgtttcgtttggaatatactaggaaagccatcatggatctcgtcccgctggtaacaggtcaagtcctgcgcgccgcatactataccgccggacttgttctggtgtcaatcgtcctcaatgtgatcaaccagctcgtcttctacaacagaaaagagccacctgttgtctttcactggattccttttattggaagtacagtggcctatggcatggatccgtaccagttcttcttcgcttctcgtgccaaggtgtgtagatcttgcacctcttgatgcttccgtaatgaaaggtgacgcctactaatgaacggacttagtacggcgatatcttcactttcattctgctaggcaagaagacaaccgtatatctcggtgtcgagggcaatgagttcatcctcaatggaaagttgaaggatgtcaacgccgaagaagtctacggcaagcttacaacgcccgtcttcggatctgatgttgtctacgattgtcctaattctaaacttatggagcaaaagaaggtatatccccttctgccacttattacaaatctcatatccagagctaatccaatcctaaacagttcatcaaatacggcttaagccaagaagccctagaatcctatgtccccctaatcgccgacgaaacaaatgcctacataaaatcatcccccaacttcaaaggccaatccggtactattgacctcgccgctgccatggccgagataaccgtcttcacagcagctcgcaccctccaaggcgaagaagtccgcgccaaaatgacctccgagttcgccgagctcttccacgaccttgacctcggcttctccccgataaacttcatgctcccctgggcccctctcccccacaaccgcaagcgagataaagcacacggacgtatgcgcgagatctacctcgagatcatccaagcgcgacgcgaagccggcgaacaagacaacctcaccggcagggataaagccaaaggcacagacatgatctcgaacctgatgcgctgcgtgtaccgcgacgggacaccaatcccagacaaggagatcgctcatatgatgatcacgctgctgatggcgggccagcactcctcgtccgcaatcagctgctggatccttctgcgactcgcctcacagcccgagatgacagagaagttgtacgcggaacagatccagaacttgggcgctgatctcccgccgctgcagtacaaggatatggataagcttcccctgcaccacaacgtcatcaaagagacgctgcgtatccactcgtctattcatacgcttatgcgcaaagtgaagaatcccatgccggtgcctgggactgactttgttgttccgccgtcgcatgtactgctgtcttcgcctggtgttacggcacgggatgcgcggcatttccgtgatccgttgcggtggaatccgcatcgctgggagactcgggttgaggttgaggattcttcggataccgtggattatgggtatggcgctgtctctaagggaacgcgcagtccgtacttgcccttcggcgctggaagacatcgttgtattggtgagaagtttgcgtatcttaatttggaggttatagtcgccacgcttgtgagggagttcaagtttttcaatcctgaagggatggagggggtgccggatacggattattcggtaagtcttttggtttcttttggcttgggttgatggggacatgggctgacttctttctagtctctcttttcacgtcctatgcagccggcgactgtgcgatgggaagtccgctcgtagggcttgggaacactattagtcttagtcttagtctcggcgagtcaacttttgtttatgaaaaatgtttgtatctttaaagagaggagaggtcataagttcagaagtaatttatcaataataggcagtatatccatctattccggtcttttgtaagtgaccagtacttcaatcgaacgccatatttacccagacagcttctaaattgataaacaagaccgaacatggtggataggtgaaaggggggggggaggggtatgagtagatggtatgagatttcaatgaaagaactaatggtattgtagttcaaaagcaatcatatctcggtggaaattgaatggaagctgaaaacgtacatgaagaaaagccattgagagaatgaatgccttcttctcatgttgttatgcgtcgttcttgcccctaccgcgttgattgccgcctccacggcgaccattggcattcccagaaacatctccagcacgatttttattcggtgctctttgagactgagctggggcctgaccactctgattcgtcttggggtttgtatgcccagagcctggagccgatacgcgcctgtgatcttgaggagcaggtccatcaccggtgtttttgttggctcgacgcttacgcgggccactggcagcgctagatgtcttgccgcctcgtccaccctttccagggcgaggttcatttggctccgggtctaccagtccttgcacacgcttactttcttggtcccaccactgctggaactcctgctcggcttggatctcttgcattttgtgcttggcggtggctgcttcccgaatcgcttccttttctgtttgttgctggagcaaaatggccgacagagagtacgagccagagggtgaagagcgtgatcctgttaggtcagggcgtgggatgtgacgaattgactggatgactggctgtggtgatgatggttgattgttgggaggtactgtagaaggtcccgatacggaaggtttcgaatgagaatagggctgtgggttccctgacacactacggcgttgtgtttgcacgggtgtagccactgtctttgactttgacggcggcgtgccagccacagtctgccgcatagtcatggacctttgaggtgatgatttaacagcctgagatgctggggcgctttgacctgggagagggtcgagtttagggagcgacgctggagaagaagctgctggcttttgccaggggttctgtggtgcctccttcgccttctgctgggcagccagctgatcttgtatctgttgttgctgaagcttctttcgctccttctgagagatcttaggcacgaagttaccgctgctttcgcgtcgatctgccatgcctagcgtgagattggatacccgagactgtaatgcttctcccatgatgtctttgatatccttcttggaactagaaatcattggcgaggtccatggcgcagaagagggattagatgacgatgctagggcttctttttggttttttgtcatcgccctggactcagatggggactgtagtagcggatcttgtggggaagacatctgatccttcaagaaaccatactcaccgaaggactcggcctctgggacgcttgcccccaaagctggggagtcagggtatgattgattttcaggtatgccttctgtgaacctgagttcacgcatgacacccttgcctttcgaagcacttggtgatatgagggcctcgtcgtccatttgaaacatgagatcaccaaccgactgtctcgacttcagcattgggctattaccaacatttggtgactcccgggatacactgttcttcgccttgcgtgcagacggagatgaggtacccttctcgttatgcattgaccgggttcgcgcatcgtcatacggctcgaaacgaccaaggcgggactgcaaagtcatggcatcgatccttcgttgcttatctgcttccacggagctgacaagttcggggtatttctcgaagacatactcctcagaattgcgcccacgggatatgggccagcacgccaactgattttcgtgacagatcagatccaactcccaaagcagagtaggatccagatcttcgagatatctgttagcgagcatggcctcgagatttagacagatatattccagggcagcatccttgaactctgtgacacagcaaggggcaattgaattgagcaaatagcacacgtttcgcgttgtgacgaaacgaccgagcatcttctgacatacttgagatagtcggtcgatcatcagctcatttgccacgaacatgacatccagaagcaagtcaatgaaatcatcaacatctccaatccgtacttcatcaaacagtcggtcttccgtatcggcatataggtaacgcaggacgaattcaaatgtcgagcgatcaatgtgctttaggtcgacatgcacgctctggtttgggtccgctttgcgcgagtctagccaccttccacccgcatgaccatggaagagtgtgtcaaagaacggacatctctggcacacgacttgactgtgcactttgattgtatcgcctttgagctgaagagtcacgtctgcgctgtcaaataagaacgagtgattgatggcatgggccatgtcgattttcaggcttctttgcggctcgaccattagtcgtgctgcccgctccagcgctggcaggcctagttgcatagaaacccgcataacttcagtgcgaacctgccggaaacgggccgagtttgcgggcgagctccttgccaggcgccagacatcgagaataccgtctgtgtaaaggaaaaagaccacgttcataacggtcaaaaaatcaacagcttgaaggcagatctgcggatgtccgtccttcccgtattcaataccaaaaacgtcggggacggatgaataatatgactggcggaactcggccaatgcctttcccagaataggaatgcggccagctatgagaaattcatgaacaggaatacaagagtcggatagggagctggtcacccaaacagtcccctcgctccgtacagaaagaaattggctttcaatatccgatgatgaaaggatggctctttggatgctttttccggatgaaagtacaagagggatattctgagcgtcatcttcgaggatcgagtccaactcttccagacctggggttgaaaacggggacaacggcaacatatcatcccaaaggctgctttgctcgacattaatttgttccctggtcacttcgcagtcacgttgagccacggcgtaggccccaaacgcattgctgcgcactgccactgcccgtgagagaccaggtatgcgggcaaatttatattctttcgacgctctttccttgttctttgtccgccgttcttttctccacgcagatccagatgttgtacagatgataatcgatccgtcttgtccaacatcaacatcactcgctgccatgtatgatttcttaacggaccatgctttaacaggggcggctaatgaatttcgaatctttgcaggattggttgtggacgttaaagccgaagagttatcggactggttggcttgaacagtgaatacatcaccagagctggataatgcacatatggtgttgcctccacacacaatcttgacaacacggtttgcagtcttgtcgtatctggttgccatgaagctatccctgataaatctggagctcacttctagtgggaatgaaagctttgaatagccatatgatgagaaaacccaaacttcgtggttctgcagaagcacagacgtagcacggtcaatggcggacaccatcttgattggacaactgaaaagagatgctccaacgcgccgtggtgtcgtttgtatctcaagcgaacgcgcatcggaatcgaccaagccaagttgaccttcgttcttgccaaacgtatagagaccagaggtactgaagaccaccgagtgaatagacgacgctgctgcacctatgatcgtctctttcttgaacggattgaaaatctggcgaggagtcgtctggatgggaatgtcgtttttgttgctagtcctaggaaggccatagccaagttgtccgaacttgttgcttccccagctgaagatctcaccctgctcggtgattgccaggctatggtcttgacccagagcagccgataagactttcttcccctctagtccacctgtctcaatacaagcaaaggtgaaacgcgtcgactcatctcccgttcctaggcgccctccaggaccgaatccacacatgaacagattagcctcggggtcatctgtgattatggcagtatgcagtttggacataataatgtcttggaacttcattggcttgtttgtgatcaaagtgggcagctcggtcgttttggtcttaggcacggtatcttcgagccctaggtgttccaatttctcgtgatattcacgataaaatcgatgcaaaagatgctcagggcgcttcaatgagatgcgctcaggaaattgtctgtcatcctgatcccctaaaccaaggttcaggtttttgttgcttcctaatgtgaagacttcatcggcggcaagatccacggcccctttcaggacactcctaagagtgtatgccccatcttccccatcatctccgaagttcgacgcagcattggaagcaacatcgctgccgagggcatcatcatcattatatgaacttggccagttttcagagatatgcttaatgtcgcgggctctaatagtcgccccgaagacatcaaaaggactgcaaccctcacgatccttgatcttgataaggccaccacttggatggctcgtatttccacctttgctgaaatctgtcatgtcctgcagatcgcgcgccatgagcgccagagcaattgtggcgttcccggcataaagagcccgatgcagagccgtccacccactctcccagtcctgcgcatatatatcgataaacggaacttctaacaaagcacgtgcaaatttggacgcggtaggtctcgaggacgaagcgacatggtgcagcagtgtacggccgtaatgatcacgggcgttaacatcggcacgcgacaaagtcgcgctcccacgcggtaaggccgcccggtcaggcacaaaggccccaggggatgatgcgatattctttttatttctcggtatatttggagacgaagcaatcatggacccagggcttccagctttcgatgacaggtttgtcgcagctctggaggtccctcctgagcctccggcagctcgcgggcccgcgaacgtcgcgttcgccagagaccgctggaaccgctcgacatcatcttgaatgaaacactcccaaagcttattactcatgtgcccggagtggtcgacgcgccgaatctcttatcaggcccaagctgagcgtcgccgtcaccacagtggggtggaccgcgacgggggagctaggtgataagagaactctggttcaaggggaagggtaggaattgccgacgctatgggtataggtcgacgcgatcgtggtgtcacaatttttgatcgtggatttgacgcgaaatggattgtgggctcggggtttgcgcgtgtggcgaacgggcttatttgcgggcaactcgaaagttttgaggaagaggaacgaccttgggagggatgctcgacggagttggaagatctgcaatgtctcgagatgtctagatggttggaagaagcaagatgtcttgagtcgcacttagcagaaatccagccggtttgccctccatgtcatccgtggatcgtggagcactgcgcagtggacgataatgacctccgggcccaaaccccacaaatacagtaagtagtagtacatctatatcgagggttcggacttcccaaactgctctgaatatgtagttaaacatgtcttttaaatgagtaacatagatctaaaagcttatagactcaacaacttgccttgtaagccattatcggcttccaaagcactccgtagaatgtaaagaacatagccaataagctatatactacgagaatccgtattatattcccagtggacgttatcaccgtctctttccaacctctggccaataacgacgcgcacgtccctccatgcccccggacgagaggcgaggatcatccagggcagagcccgtggggaactgataggatgatgttgtatgtatgacatttcatttcatttcggatttctcatctagaatggcctgacatgcagatcagatctctcatctagaatggcctgacatgcagatcagatctacatcataatctttcgaccaatttccaagtccggaatccccgtcttcagctgtgcacgtcgccggctcagcgccgcattctcccccgcaatctccgtcaactgatcctccgtcgggttcgcaacaaactgaggcgagaaaagtccaagcggcttgcgtggtcgggtgagcagaaagtagccggtggctttgagtgcagatgttgtcgacaaaccgcttagatgcaacatcgtagtaggcagccaagatgtcatgaatgtaacgaacagtgctctcggtgttgctcattggagcttttgcctcgtcgtcggtaggctcatacttctcccggtggctggtggaaagatgtcagtgtatctcgtaagtcgattaggttagtcagacacaccttctcttttgagtttcctcaaggctctcataaaatccgtcattcaatgtcgttatgttcatgcgctggacatcaagaaccagcttggcctgctccattgcttctctgtatcgcttcgacagctcatcagcgagaacactcaccagtttgtcgcaaatttgctcatccgggcaggtgactccaaggactttgagaataaaggcatgcatgatttcgatcacatccctaacatatccgagcgcgaggtcggcccgtttcccagattgccggttcatgatggtgcacaataaagagggcggaaatgtccccacttcgaatccgcgagaagtacaataccggtcctcgatccatgcaagaatgctgtcggttgtgggcttttccacaatctcttgctcgtgaagaatgccatcaatagcgccactgttgtccaacacacccatgtgcttgcgaacagtgatttcgccatcatcttcctcatcctcctcatcttggatatcggaaatctcactgacgaactggtattcaagcccatattcttccatttcggacttcaaaacttccatgcggtttctgactattgttgtcagtcgggtatccttctctttgtcgaacaattcatgtgtgccgtatgaagttgtcatggcctgcgaaacaatatcttgaaatcgagctatgaaatcgagcaggaagcttctctgctactccggggtacttcgctcatttccaaaagcagacaaatcatgcctcatggccttcggctttcgaccaacatcggtacgcatctgcatatcaagtcagccaaatctacaaacaaaacgccagacggtgtggcataccttaggaaactctcgacgaatttgagtcgtttgtacctcttgcaggcgaatcttgagggcatgaattccaactttgtccttcggaaggttgctccatgggtgattctcccgaaagaaccgggcctcgaccaagtctcggtcagaactctgatcaagtagctgttgctgggcggcattgcgcacaacaatccagccaagcgctaaggaatgagatttgccctcaaccaagtcgatgactttgttttcagcccccttgtctaccaatcgggtttagtcaacactcccagggtgcgaatttcctcgggatcgcactcctgcgccatctcgaggatctcgtgtggctatgtccacatttgcgggaacgaggtttgcgcatgtagcccaggaccatcttcttcaccatctccatatccagcttggtagtgagaccagatgcagtgttcttgaaaatacctgggacatcaatgatactcaaattatcttcttcgggtccacagatctccaaccggaagacatcttgagtgaaggtgggcttgaaagggtcggtttccgagcctgataaacccatggtctggtgaatctatagtaataactagtcattacaagggcttcagttatgatttgctcaagcagcgaaacttacctcttccatggtttcagcgaaagattcggggtcgagtgattccatattggctcctttccatgctgccaagcgagaagcgtgctctgggtctgtgtcgggtgctggaacgatagaggcagtgacagtcctctttttgtccgctttgatccgtcggaagatgatgtgagtagcaaactgagtgcaaagtccactatccctggggaacggcaacttggttagccccttaagaacggagctttttccactggattggtctcccgcaacaacaagctggggcaagttgacgtattcaccaaggttgtaggctaggagccggtcaatcttgtccagcagaactgggtcaccgagcccttggccaggcaactttggagtagacgtaacggccacggtggtaggggatgaaaatgtgtgacgttagaaggttggatttatatcatcttctgaatgaataaaaggagagaaatggtgagtgagaatgggaaatagatggggggaaggagaaaatatccattcctgtatatctttcaacttggactaggtttccagaactttccgatgatctatgatagcaatcatatcctcttcatctacccagtttcaatggagtcgcattctttgagtctttattagcacccaattgagaatcacctcttagcaaactgatagattcaaagaattatcattatacatacttcctgtgctctttctaacatatagcattatgtttgttttagaagtcactccccaaacattttttcactgacccccgtacgcagtattacggcgttcgatggtcaaaccccggcggtgtccggttggattggaactcgaagccaacaagttgagttgttcgtcaagttggacagctccgggttttgaccatcgaacgcattcgttcgcataaggaaattgcttccgaacgtagtcctgaaggtccgcccatgccgcttgctctttgcgccgttaatcgtcgcgtacaccgtaccaacaggccgcccttcttccttgctgaaacggctagtaaaagccgacagatcggggccgtaccactctaggcattcgttcaactggcggctgacaacaaaggatctatcatggaccccaagattccggaatccgtactttccacttccttccattcacatgagcggttctttgctcataacgtcaaagaagatctctgaaaccgaacgccccttcacaggggggtcgtaaataccgccgccatcaacaaacggtcttgttgcgttgcatggcgcaatatcgcgccgcattccattacggaaagcaaagacaagaagcagaacaccttcggcataatttatcgtcatgtgtagagacaactccttgatagtaacggtgtcgaatgacgatcaatcatgccgaaggtgctcgggagtacagcgtacttatccgctgacgacggaccttggacatagatcgttcagtgatcgagaatattgaccttcggtatctggtaggaccgatcaaactgcgcgggtatcaactgcacaggtacactccgtggggggccacgcttcgcctttttaacagcgcgttgcactttagcctcgatatacttgtcgagagaacctcgggtatacttcgaagaagtacgaccgcccccccggcccnnnnnnnnnnnnnnnnnnnnnnnnnnnnnnnnnnnnnnnnnnnnnnnnnnnnnnnnnnnnnnnnnnnnnnnnnnnnnnnnnnnnnnnnnnnnnnnnnnnnnnnnnnnnnnnnnnnnnnnnnattgctggaagaaggcccgcccgccgcgacggcggcggtattagctcttagccttaccggcccaggatttcttaccagttttgaaagccatttttgttatttagaaagtttaacagatttagaatgaaaagggactaccgtgccatactatatcatatataatataacattggcggaatgccaagaattcccctatcggatcattttctcagagttccagtctttagttacttagaatatcctttcttagatacagttacaacttgaccgtctatatactataggcaatactatcatattacccgagactaaccccttctgactggttagcttacacttatctgactaatagttagtatctccttctaccgactggtaactaggtccctcctattcctaaattttacctaatcggggaaatacgttgagactcagactcaagtttttagggcaaagtaatagtagaagtgggtccacttcattgaaaaaagtctgtccaattagattcaacttgataaacaactccacttggttgctgcgagttccaatcctaccggacaccgccgggttttgaccatcatacgtacagtacatgggtatcagatataataaggtttgcgggccgaacccatgttctccgtacccgagctcctctgccaaaattattgtttaggttaactatttcagtgcacatactaaattatttgcatataacaatacaatggggcagactatctgtgtgatactaggacattcaggcccgaaggatcttccctgtcgttcagtcacctatatcaccgggaaatccattagatagtccttgataacaaaatattgggagcgatcatctagctatccaactatccatttagtagtttaaagaactaatttttgttcttttcgtacttggattaatttcaacccttttgaatattaagtatactgaaatgaaaatgtggcataatcacaggtgagaataaatttttgttcgacttctccgatctagcccgagggctcggaatggagcggcggtcgccccagcaggttggagtaatctcttgttagagacttggatggtaaaaagatatattaaaaagcaaagtcggacacagctggatcgcaaagtcaaagtaagcagaatccgcacaggttattcacatctttttcgtcactcccagagccctccaatgccctatcaaacccccagtgcaatggatgccgcgaagaagagcaccaagctcgcttgctatcccaactgtttgcacaatttctgcagccaccctcgatgcttcaatctaactacttgtctcacttacacagactgtcatgtatgcggttcgagaaagtattttattgaggtttggaggctttaggaagttggagccggggattcagcagcctcttcctgggcatatttggcttcggcgctagcaaaggcagcgtccagctccgtgcaaggctcatagctggcgataccaacaactccgtcatccttgtccttcaggtagtaccctccattttcggggaatagagagccgtaaggttgatctttggccatgtcgtggagggcctgtctatcgatgaggataatagagtcacttggaggcgtggcctcgtcgcgggtgagggcttcaaccatggcggtaaaaaggcagaggaagggcacgatggagatgaaagtgaatttcatatcgaatgaggggcacataaggatccctgtaacgagtatgtgtcttagtcatctctttttatggtccacaggtgtatcgtgaaatcttgaggcataggttgcccttgaacataccttatgattgattgaaaggaagtatgagactatgatagcgatggaaacatgatgtcttctttatagcacttggatgtgactaggtcagtcaactgtcctccctgcagacaactatatagtcaatgataagtaatcatatcacgttgaatgctctttgcaagtgtgcccatttttcagttatttcaaggattcatgcagccaccgccccaggacggaggggtgacatgcattcatgagaggtttcgcccggtattacgaggctagagggttggaatgatctaagacataccagggtctttcgaggatagggtgttcaatggattgttgctgtctttgtggcttttgtggtggaactgtgagaatgtccgagataggcatacaatacatgtatatcccctagtcaaacatcccaatataaacaagccctgaccggcgggagatgccgccgttccggatgtatacgactacaggaaggacatattcaagtcgtctgaaatagttgatttgaggattgctagagttgctttgggaaacataatactatgacatcaatacccttcaatatatatgttagcgcttggacgccgaaaacataccaactatgcccagcttgaacacacccatggacctatatagacagatgacctcttggaaatgcctgctagtaaaataaattgtttataattttgtagtacgaaaccagatatatttagtgagtgaggctaaccaaaaaaagaaaaaaaaaagacaatgaggctgacccgatttgaacggataaccttgcgaactggagtcgcacgcgctaccgttgcgccacagccccttgttcgtgatatttaacataatgattagtatgttaaaggaaaaattgttatccaacccttcactagcctcatgctacgtagacatatactctgactgaacgaataatttcgaaataggtatagaagcagtcagcccttgagagcaatggacttagtaattatgatagcttggatcactgttagcatttgttatctcatgggtagcaagtggctgcgctaatttatagattgacctctttgttagaccaattacaggactacgaggcatccatttgaggatgctataacagcttcctatggcttggttccgttgttccgtttatcttgggctgatttttatctgtctagtctactccacatgagcttctttgaatttcatacggaaatgccttattgtagggccccaatagtacataacccgaaagatttccggcttgatgggtgaatttgagggatttgggcgatattttcaaaaatggtgaatatgccttcttttttcctcctcctgttgttttccttctggaattgtatatgtggcgcccctgaagagagtttcttcaacaatatgtgatccactactactccgtatgcgaaaaattcagctccgggccctccgatgtacggagtacgggtgggtcttcactctaaaactaagaggcaaaattagtcaaagtcctgaatcccggcgagattataagagtaaacccacaagagcttagttagacagcgcgtaagcctaaggtctgcagcagtttagaagagctgctcgggatgatcaattgtggggctaaactagcgcatcccacagctcatccattattctgggatttggtgaagaaataaagctggaaaatgttgaccgaaggctgaaatcataacaaagaatagaagctataccgaaccaaagaccatatgcctttaaaacataaaaaaaagttgaggatgtccatcgctattgaccatggactcgatctcacccgggtataaccataggatgttgtatgtccacgtgcatatcataaactagatccctatatcacttacaacatatgctcccctctatcctctcatttctgcttctaccaatcggtcttgtatcctattccaaacctcacttctgattaagctccacacttaccaaaaggggaagtgtcatctgcctcccaacatctctggaattttgtctcgacagaatgaagctgaaaagtgcaacccaagtcctttcatgtgaagcgccaatacaaagttagcgtcagcatcttatgcaagagcctgctttttgcaagatatcctccgcatcttgaggggtaacgctaagacaatgccggggtagagccctcatgcgcaactaattgggtatatacggatgtaggatatggagctaaacgtgcttactctggctcgagtcgtattcactacgtatctgtcgcagaagaggtttctccgatacaaatgtctcaataatcagcctcggatattggatatcatgccccccagacgggaacaaaaagaaactttgtgcggggttttggcgccgatcttccacgagtttgaaattttgttaggccccaacttctatttagatgctgaaggaaaaggaaggtaaagaggtgagtctatcgataagtgtatttgcatatcgacctgctaaatgtgttcacgcttctgtaggcagaagatatcaaacaaacctcatatcagggagtctgaaaggcatcagacagaccatgtattgctccgaatggtttatgcacggagtatcccccgttgccatgaacaggtgatgatcgtcgcactgttcaccggcctcggtaatctatatcaatcacattcttagaagttgtttaagtatataatatgagaatcgtcccgctctatcatgtagaataacggccttgaatcccttatatagagcaggaaaatggcattgtcccttgcgctcatggtgcgcctagccctggttggcctcgtggtattcacttcaattgcctcagccctgccggcgcctcaagtccctcgcagcacggttcaggaccccgacactgatccgttctatcagccacctgctggcttcgcatccgaggcgcctgggacaatcctgagccaacgcaacatcactgccgcgttctttggtctcgtcccggttgacgtggaagcctaccagctgctttaccgcacgactgcaatcaatggctcggctattgcaacagtcaccacggtgtttaagccgaaggacgctaagcttgatcgtttcgtttccttcgccacggcctacgatagctctgcgacgaaatgtcagcctagctacacctaccagcttggttcgccacaggacagtttgatagcttcggtcgagctattgatcattgatatctaccttgctcttggttacaccgtcgcttctcctgactatgagggacccgaggctgcctttggacctggtcgcctcgcaggtatgggtgtattggatggcatccgtgccgtgaagagcttcaagacgttgagtcttactgatgaccccatggttgtcggtataggctattcaggtggtgccattgctaccggatgggcagcctctctgcaacccctctacgcgtcagagctgaacatcaagggctgggcgcagggtggaactcccgcgaacgtcactggcacaatgtatcagcttgacaacacagccttcagtggcttactccccccagctattgctggtctcataaagccaagcgcctatggtgcttcgctgggccctttcatcagcgagatcataacggctgaaggccaacagatactcgacgccgccgttgccgaatgcgccactgcggatatcgcggcgttcttcgaacggtcaatcttcgacactagcttccaaacgctaggcgaaaattttattttcgacccgatcgctcagtcggtactaaagcagaacaccatggctgccaacgaggacgagaccccgacggcgccaacctttgtgtaccacgccacagacgacgaagtcattccttatgccgatgccaagactatggtcaattcctggtgtaactggagtgcaaatgtcaagtttactacttatgccagcggtggtcatgcgaccactgaaatcattgccattcccgatgtcatcaattttgtccaggatgcttttgctggcacgaccgcaggtggctgcaccacgaataccgagcttggtagtattcttaacccacttgctcttggtgtggatcttgagccaattcttgtggagctcattgatgcgctgttcaatctgggcgatcaggactcgaaggtcaagaacgaccccgttggagtgctcggcacaagcctttaagcgaatgctgacatctattatcattggtcctgatgagcgttgagggtttgagccgcaactgtttctgatatgcacatggttattcgctctgccacctttggtgtctttgtttcctttggctaggctttggtatcctttgtgggacattataaccttttctgtcagcacataatgtttctcaccaacaatgagaaggcagacttccgagtcgagcttgtgttgatcaatggaatgaagtccacaggatatgacgttggatcagataacggtgtgacctgccaaaatatagtatggggaaatcttggaagatgtcaaagtactcagatataaaggatccatcagctgcctatacctggctgtctgtagcctccaagtagaacgtcttgatatcacgccttgtaagtcgtgatcaagcgcttatcggttccaggggaccttgccccgggtacggcgatccttgcgaccgtgcatgacacccggcttgtccaacagcctgtttccaggtaaaaggaagttatacaagtgaaaggagaacaggagcctagtttatcaagaagataggcagccaaccccccgtgtttgcatcatctgtgtggcgttctaggctgactaggacactcgagacctgtcgagtcaccggatgtgcgtcacagacgaactatcttcattatcacaccccttctctctctctttctccgcatccacctgctttctcattcttttcttacgagctttatcatatttctctcgcttctctacacccctcacggtgattttatccaactgcatttgcccgtgcggagaagctctagacctgccccgaaggtcccaggccggagtcaaccccagaccacatgctaggcgcccattgtctcattgtgaatcatttagcgtctcagattcaggaacattcttagaagattatcatcaccttctctgttagcatggccctcagtcttggatccatcgctgcccgattgcgttcctgataacagattccggcggtgataacactcatatccagcactccccggtaatgccgttcttacctcttgttcgcatgcatgtcgatggtcgctaaccacggtgtcgcaactagaagaccaccatgcatcaacatccccgatcatcggcggtgccgtctccgccgccaaaccttccacccagaccgacagctcgggacgtccgcagagaacaggaaaccgccccgagctccccaacggtcgatatggggtctaattatgccagggggctggggttagagccgggacctcaaccgtccgagcaggggaggaatgcggcattgggcaaggaggccctgacccggttaaaccagataatatcggtatcgtcattcagatcgcccctctcatggcttatcaggatagctcattgacggctaatctccttttcaacagaactatcacacaaaagccgctttgattatcctacattcacgagttgcactgcctccctcctttaacaagggctccgattctcccagagtcaaccgctgggtatgtttccaagtcatggtcggattcgcgatgctttttgggatatcaaggcacatgaaagtggcaggcgctaactctgtttgtttccctccagttcaatgtcgagttagatgatacagatgtccttcgggaacccctgcgaccttggagaacatgcgatgcaacggacaaccgaccaccacccctcgttatcgaaacgtacttagacacaaagggcctcacaaataatcaaagtctggtgattattgacgagaatgggaagcgttgggatgtgcgtgagtcgcttgcggcgcttcagggtgcccgtgcaaagccataccaatcggaaaatgacgagattatcttggagcggtggaaaatcgaattaggagagtgctccagcaggcctccggcagatttgggctctatcttgccgactgtgtataagaaaagcattgtgctcttccgttccttgttcacctactccaagttcttgcctgcatggagattctctagacgcaacaaaaagttgcgacagagtccggccctccagatcaagtatcgtgtggtagatgggagcgctgctcgtgataacctcccactggatcatttgacagccccgttgagcgagggaagcgaaaaagtggtggacacatacggctttggggtcacggagtcgcccgcaggtcccttctcagttcaagtcacgtatcggacgaactgcgatttccgtgttgatgactcagaagcgctactgagctcgcggtttatgggtgccgacgacgagatctttcgtccgtcgttgccttcagatgatgtcaaccgcccaaatcccgaagtcggttctgtgccagtggagagaagggccgttgagagcccagattgcacacgtgcatacggcagtctctccacctttcatcaggttggcccaacaacaggtgcaagtcctatatcagcactccgtgcaatgagagattcgggcgcgggatctccttcaccgacagagtcacctaagagactcctcccttctgccaaagtccttccttcaggacgtgcggcgcagattgctggtgaaagcggagggtcaagtttcccacgtcgtccctctgtctcattccaacccttcaaagctccccctctgtctgcttccccggctttagcagactctcccctgggaatgtctccccgcaacacgtcacgaatctccacaggtacatctgccgattcccgcgtcatgccgcccctttcttctgccgcttcagcgcgcagacctataaccatcgcatctgaacaagctatatcatcctctaattccgcatcccccaaacctgctccgatatcccgttacagcagttcctttagccaccgacgaggccgcctttccgtagggacaaacagactggaagacgacaactccagtggccgagcgagtgcgacatcatccaatgcacagcccgggtccggcctacttacggaagctacgggcacgagtgcggagtctattcacgcagatgacgagaatatctccgactttttgaagatgcttgattcgaaaaaggatctaatgaattcatccactgcatctcttcaacctggtcctaggcaggcgaaccccaccgcagtagctcttgctcgcttccgcggtatgcgagattcaaatgccgcgttgtccgactcaatgtcacagtctatgcacatgcatcgctcttctctttcttcgagcaagcaattgtcaggggtcccaccgatggttgcgggcacctccgtctccacagcttcttctccgggcaaacccatatctccccacactccccacacgcctgctatacgatctcgtctaagctcgaacagcgttgctgatgacattgagaccgaccaccgttcaagaatccctcgctcgcaccacgatccaccactcgaagaacattccagcgcagaaaatacgcgaggagcttcttctactgcaggggctattgatattccaacatcgccgcggattttcgaccctgcttaccgccgctcgagctccgcagccgtgcgccggccagtcgttaccagcgacgatgatgaaatattcccattcggcatgcgcagcctcagtctgggggccgatgagccctctcacgccaccctagctgccgcccaacagcacactgagtccctgaagagccaacaatcaccggccgagggtcgaagcggtccatcccgctctgcagcgggtccgtatcgggacagtgcatccctccgcggacagatgtctggaccaaccagcgcctcagcctcctccaacccccatgtctaccagccccggttcgccagctcccgtggccgcggctactcgggcggacattccgtcagctcagcatccagcagcctcgcccggggcgccaatcccgcgccgcatctggtggagcgcgaccatgaccgtgatggaaacgccagcggaagcaacagcggcaactccacgttagagatccgccgtggttccgggcagcggccgggcgcggttcggacgctttccggacaagcgcccgaagacgatgagccgctgctcttcgcgatgagcgactttggtgtctcgcggcgcagcctagatgaagttcgacacgggaaccacggtggggctgaatcggctgctgggtcccggcgcgggagtgggagacggggagcagggctcccgggcttccatgtttggtcttgaagtatgagtatacattggcattctaatgatgctttattttggatttctattctatcttaacctcctaggtctcttactcttccccacctccctctcaacatcatcttatacaggcgattgggcctccattcaatttttgacgtttgatttccttttaaaccatttcctacttgcgcggttggctgatttcatagattgaatactccaatcacagattgattactgcgatgtgcatagagattgggtctcgttattgttcggttttgtttcgggcgtttttttttcttgtttatttgtcgttttccttcttctttcttctctgactcctatttttgttttcacttcacttcgcttccgaagttctgggattgctttgctcatttgacatatcccctctctacatgattgatacgacttgatggtttcttgggggccgcgttttctccttatgactatatgattcttgatctatttgatgatgttggtggtttttacttggtagagttatattatctattaaaaaaaaattgaaacactttggattcgtgcaagggagaaaagattgtgcctataacggcaaaatatcacatggaacgattaagcacttccagggggctacatacttatcctgtgcgacatatccgagcccgccgtatttcagcgaaggcttggatagccatctctccgatgctacgcatgctaatggagaaaccgactgctctttgacaccgtcacacttaactagtaggtggccgagaaatggcccaattacttcctccacactccattcgggccggttctactatctaaactattctatacaaagggttaagtttagaccagatcctagctagaatatacccgcgttaagttagaggctctactgagttctaggaagccctaaggaaaacccggcacgtatagttacatatgtaccggataatgcctggcactcgagacctttccctttccgttttagtgctcacctcttgccgctttttgatcactgagtaaaacggagcacgtccctgagtaactagttagttaccctgacttgatcatgggccattatataatcaacgtgatctctgagtaactactgtgccacgtgatcaagtttaccagctgtgctgggctccttgatctccttcttcttcgacaactattgatatcacattctcctgtcggcttacggggagtaactctggaatgaacactataaggccgtccattcctcgtttgtccgctctacttcgcaataaaccgtttcccataccttctccggggctacctttaccgcccggtatactcgttgatgaagagatctcgccggtatacgattccaagtacttctacgcagcgaagcctggagaggtactcgctgatcgttaccaaaccctggttaaggttggctggtatatatcttcaacagtatggctcgtgtgtgatttgtaagggtagtctttaataatttctgtttaattcgaagctctctccatctctaataaatatataggtatatcgaaaagccagggagtgttatagtactaaaaatcgctaataacaatgcgagttccgctagtcatgagcgtgggattaaagagcacatttccaccgcagacccgtcacaccgaggccgctcacttatccgaatatctttagactcttttgaagttaaaggtccagaaggttcttatttgtgtcttatatatccgcctataagggagccattgtccatatatcagcggcgcttcgaggatagaaagataccactgcccctcattaaaacatacattcgtactcttcttacagggcttgattatctttataaagaatgcaggatagtttatacaggtaagttcatccttagccttatatcctgtcggtgatactaagcccaggcggcggcctagatctaaagcttaaaaacatcatggtctcattcgaggatccaaccgtacttactgatttcatgaattctgagctcgaaaaacaatggctttcaagattgatccgacgggacgacaagtatatcagtcccgtaatgacttcgggccacttaaaagcctgagaagtataccacagcttatcgactttggcttggcaaccagactcgaggaagacgacgactggggcatctggcctattcagccagaccactatcgggcgccagaggtgataacaggtaatggatagcgaatgcctacggatatttggaatcttggtgttctagtacgtcccgcttttctctaaagttgttattatccactaatgccggaccagttgtgggatatgatcgaaggaaaagagctatttcggcatatccatgatcaacaaggtcgttacgatgctaaactacacctcgccgaaatgatagctttactcggtccaccccctccagaggtcatacaaaggtatcaatatatgcgagagtactcgtggccggaacctgtcagacgagaagacgacagagtatgcgagatcgcggaggagtacttctgcggcccattctttgacagtaatggtatcactaggtttcctatcttgaacgaattattcttagactcacgaaatatcttaggtcgctttctttacgaagacctgatccccgaccggaaactatacgacacagtttccttccttgaaggaaaggagagggaagcgtttctggatctcgccaagggaatgcttgtctggcatccagatgcgagaaaaacggcaggcgaactggcggggcatccttttcttcaaccaaaacagacaagcgcctgattgctgcgagcgtttgctagcggaatgactcaaaatcgtggttgatcccagttcggcggttccatcaaatggtcagttgaagcgttaacgtagttgtctttttgaatgacatctaatagagtcagttgatctgtttttgatcggaaagtaatagcattatgccttaaatgggatcgaagacatcgaattaaatcaaataaatcaaattcccaaggtacccccaaaggggtatcacacccgttgaacattcgcgcgagcaacagaggaacagggtgaataaatcaattaaattaatggattgaagtccagaccctccatagcaggcagcctcctaaggaaacccggtacgtatagttacatatggattgctattgtatgtaaatgcacctaaacgctgacatcacattgtaagctcgtaccttccgtataaactatcgcctccctgtatgtaggtagtctgtggaatgccctatttgcctatttaatacgcgtcacagctatataagcagctcctttacttgtttgtagagaatcaactcttcttctctttccctccttcgctctctgagcgtcttaacatagttacgaacttcacatcaacaatcattcgcacaacaaaatgtttgatagaaccatctgttgctctttcttgcttttggctctgtctagtaagtttgacctcagcttgatcctattttgacctgattttgacctctcttttagctgcaatggtgattcgagaggagggggtcgagtccctagtggcgaaactcgtccgcctggctgaagagaagagaagggtgattgagtgatgagcaacgtggccagcaatctcatctggatgatcgttgtctgcgctgcggccctatagcgcattgaatttctcttactggacattgcggagattgttcgaccggtatgtcgctgtgtcccatgcacataatcttgcccgcatcgaattgtgaagttattctcacttcctcgatatcaccggacatccagctcaccagattccttttcagttggccctcactagagtatcagcccgctgcaatctcacctcggtagcgcacatctgaatgttttgtgtaaggtacacgactaacatatacatatctagaccagctcgttaaccagatgagggataacaaggctgtctaaggtatcttatctatatatacgctcagagctggtgaccgacgcagggattttctgacgctgacagaagagactttgatcctctgtgaaaaggaaactaattaccaaacaacgcgatatcatctttgaatggacagacaatcatcgtctcgcccaacgagtccctcgaaacaaacaggtgcagcgggaagacatctggcagctagctgcttagcacggtgctcgggcagatattgcccatctggcagatattgcacacttcagcaaggtgcggtaggagctctatgggactgtgattaccgattcgggcgcgctttcccctacagaagcggagtccaggagacccccggagcccgccgttgaaggatcgccgatatggattttctcgagaggattgaccttgttcatacgataaaccatcaccttctgggtttcttttcattttaaactatgatatactcgctgccaagcgacatcggcgtcgggagcgatgttaatatacgaagtaagtgataagacttgcgagtccactcaaaatatttgattctcgggagttgactgagcgtgttcgctggtaaggtttaaaaggcgaggtctcatgttagtttgaacgtacacttcataccttgtattggcctgtgctaagtagaggctcacttaaatcataggtagcagagagatatgaaaaggaaaaacaagtgacttcgttacggatcatgggcattccatggagacatctaaatacattgaacatccgatttttttaccctgctagcatacctcaacttaacacgcttatgcgatgtaggtcgaggccgacacgtcaccaccacggccggtccagttaacgtggatatccttgccctcggggaaggtctcgctggcatcctcgggcttgatgcggaaagtgtgggcaccgaagtagtcacgctgggcctggagcaggttggcgggcaagttcttggagcggtaaccgtcgtagaaggcgagcgcagtggagaaggccggagcagggataccccacaaagcggtcttgctgatcacgtgacgccagccagtctgggcgttgttaatggccttgttgaagaagtcgtcgaacagcaggttctcaaggtcggggttgctgcggtaggccttggtaatatccttaaggaagacggagcggatgatgcagccaccgcgccacatgagtgcaatggaaggcttgttcagcttccacttgtactccttggcagcctatattggggacgagggttagaaaaccgactatcagtagcggataaaaaagacttacgttctggatgagcatgaagccctgggcgtaggagataatcttggaagcgtacagggcctgctcaaggtcgtcgatgaaagcctgcttgtcgccctcgaacttgggtgtggggccgctcaggatggtgctggcacggccacgctcgtccttgagagcactgaggcagcgggagaagacggcctcaccgatcagggtaacgggcatgccgaggtccagagcgttgatggcggtccacttgccggtacccttctggccagccttgtcgaggatcttgtcaacgaggggagtgccatcgttgtcattgtagtagaggatatcacgggtgatctcgaccaggaaagagtcgagaacaccgctgttccacttggcgaaaacatcaccaatctccttggaggagagaccgacaccgcgcttcaggatatcgtaggcctagatgacgtcagtgatcgctcgagaatatcttgcagcttgagaaggtagccttacctcgcagatcagctgcatatcaccgtactcaataccgttgtggaccatcttaacgtagtgaccggaaccctcgtcaccgacccagtcacagcaggcctcgccgtcgctcttggcagcgatgctctggaaaatgtccttaatgtggggccaagcggcctcgttaccaccgggcatgagagagggtccgtaacgggcaccctcctcaccaccggagacaccgctgccgacgaagctgatgcccttgccgttgaggtattgagtacggcggttgctgtcggggaagtgggagttaccaccgtcaatgatgatatcacccttctcgaggaaaggcaaaagggcctcgatgaagtcatcaacgggcttgccagccatgacgaggagcatgatacggcgggggcgcttgagcttggcgcagaactcttggatggagtgagcaccaatgatggacttgcctgttttgtagtgagcattttttgcaacggccattggaacctgttattctctggattgcttacccttagcctcgttcgccaagaagtggtcaaccttggagacggtgcggttgaaagcgcagacggtgaagccgtgatcagcaacgttcaggatgaggttctggcccataacggccagaccgatgaggccgaagtcagcactaggagcaaagtgcgccggagcaccgacattgatgccggcgagacgggcgctatcgtcagcgaacaatgtctcttgtcaacagatgggtaaaaaaatgacaatgggagcaaaagagaaaggaaagccgtgctcttctgaaaaaagatcagattcgcagtagctccattggtatcatcttgcgcgagcacctatagggattgggtcttccagatagagctgttgcatgatgtctgagcagcattgaagatccatgcgctctgttatccgtcgggaggcgtaaccgctgggctggaattggtgaaatggggaggaaagaaagatgacttacacagcttggtcagccatgacgattatatgtgagatatgatattgattaaaaaaacggtgaatctagagaagagaggaagatgaagagagagaggaggggaagaagaagaagtagctcggctgacggagcaagtcttccgtcatcctgtgggacataccgggggtaccgtgtaccagcgtggttcttactgtctccggtgtagcgccaagtactaagtacaggagcagagtcgtccggtgtcaacccactcgggttctgcgacaatttggaaagcattatccgacccggtttcaattccctatatgctacgtacatcctctgttggatttccggtttacacagctttatagtacatggcattgtagcttttactctgcaagagcggggcatggaggggtagcttggaactgaagaatgttatataacatagcaagtgtatagtaaggtatcaagcagatgatgaagtagcagaaactcaacccaatccccatgtaagtcacctaaaccatccacacatcccatcccaccattttccacgcatcggtgaactgttctggttgcgacggagaaatcacttgccgatgagttcataaccggctgcacatgggctaggccgctttgggactagagtgggggttacagcgcccacaacggcaatgactcagcaagagggctgggggggcttatgtcatagctgagtcaggaaagcttggttgagtcatgtgacacagccatcgcagacggcctggccagcgcatagacagagaagccatttctcatctctcggattttccattaagcgttgccatcccgcctaatatttcacgacgcgcatttttataatccttcaggccacttacagtgactataagcggcggaacctttcacctcttgcaagtgctcatctttcgggtgcctatctcaagcgtgacggtcagtcaggccctgaaggtacgttgcggttgctacttcgcatctagcattctcgtctctccatctctcgcatctcatttctctctcccccccccatttgaatatcccattcatcatgtcccttccgcctcctccaggtctcaaacagactccctcgtcacttccgccccgcccacctccatcctccaatgccgcgcagcctcccaccgccaatcctgcaggctatggcgggagaacccgaccannnnnnnnnnnnnnnnnnnnnnnnnnnnnnnnnnnnnnnnnnnnnnnnnnnnnnnnnnnnnnnnnnnnnnnnnnnnnnnnnnnnnnnnnnnnnnnnnnnnnnnnnnnnnnnnnnnnnnnnnnnnnnnnnnnnnnnnnnnnnnnnnnnnnnnnnnnnnnnnnnnnnnnnnnnnnnnnnnnnnnnnnnnnnnnnnnnnnnnnnnnnnnnnnnnnnnnnnnnnnnnnnnnnnnnnnnnnnnnnnnnnnnnnnnnnnnnnnnnnnnnnnnnnnnnnnnnnnnnnnnnnnnnnnnnnnnnnnnnnnnnnnnnnnnnnnnnnnnnnnnnnnnnnnnngccgtcacggcgtcccagccgcgcgcggtagcctccagtcaaccgcgtcgccccaacaactactcggtcgcgaatccgccagtctctgctggatacgcaacccccgtcaagagctacgtcaatcaatatcaacaacctcagacataccaaagtgggccttcctactatggacaacctcaatacgctgaaaacacatacggcccgaccgtcccacatattacgaacccgttcggatctacgcccaatacagggttttcacagggtggcaacgcccccggatttgacgcagagacggaagctcaaatcgcgcagtggcagagcgcctacaataggcccaccgatgaccccaagaatcaaggcaaccagccgggttcaggcgtgaacacgggagctggaaccccaaccctcggcgctggcactcctgcccagcaggccgagtcacaaaaaacagttattcgctctggtggtggtcagacatggaccgactcgaccctattggagtgggacccggcacatttccgactttttgtgggtaacctcgcaggtgaagtgacggatgagtctttactgaaggcattcgcctcctacacatcggtccagaaagctcgtgtcgtccgagagaaacgaacccagaagagcttaggctatgggttcgtcagtttcagtggaagtgacgactacttcaaagcggcacgagaaatgcatggcaagtacattggttcgcacccaatcctactgcgccgagcggtaaccgaggttcgcccaacttcggcccccaagcatggaaagcatggaaagaaacaaggcaagggcaagggtcctaagggagacaacgccggtggcgcaggtggaaaagtgaagcaggacggtatcaaaaagccagccaaaacgaagggaggattgaagattctgggttaattatatggatacgccgtttacgtgaagaccgatagtacattttcatggcaagactaaagatgctttcctgttgccaaatgtactattactgaaaaaaattcgaaatatcaaaaccaatttcgttctcgagtaaaagggggctgagtcacgtgaatatacttgtggcctacacttgccatcatcatctctattgcgctggacttgtccttccaagatactaggtatatctcattgagaatctgaacagagggctttcctgatatatttctagcctgctcataatacccttacaatatacggagtgtcttgggtacctaaccacagtatgtggttagtacattggcattgagttccccagcccctctaaaagcacatggctggggaaaaaaaagctctgtttaaaaccaattcacattccagctgaccccatcttctccatatcttctttctcacattcttctgatctataattttccattttcctccaagaaaaaagaggcttgtgtgttgcaagaaccagccggacgaggctgtatacttccgtatacagatcccacccaacgcattgctgcccacctgtacacggcctacgaccttgaactccacgtcttgttttatttttacctatcctcctaccggattgacaagcaacgactgaagctctctacacatctcgccaaataatatacctctctaccacccaagatggtccagcgcaacatcaccatcgcgattatcatcatcatcctcttcctcctcctcgcaatcgctggattcgccatctgggctgtacaaagccacgtctccttcttctccaggaagaaggagaccgatgcagagagtgcggatggctgataaagcagggtagcatgcagcagcaagcactacaacatatacacccttgacgctcggcctcgggcctctcttggtctcgcttttacaggcattaattgcctcttttctttttcggaatacgcacatatacataccatcacgatcacacacacatctacgactacgaccttatctgcgatacgataccctttctgttggcattcaatactaccacccacgatgacgagctgcgttacgagtctttcacgttggaacacgcctttttttgtacaattgttagcgattggaagcaatcagtacatacgttgctttcggtgtattttcttctttttctttttttggttttttagtgtggagttagaggtcttttgctgagtccttttcttttcttggatgtatttgacgaggactgcattgatgcatattcttcgctttgttgaaacccatggtgcatatttccattgacagtttgaaaatatcccaatttgacaaaatttcggaacaacatcgatctatctcacatcttttcgaagccatataagaagggaatgcctaggtagtgtcccaaggatacagatcgtagatgtaaagatatgtccatcgatattttaagaagtatgattccgacttctcgatacttagacaaccatgtacaataaacaaggggaattcaaatgcactgcctcccagggtatacatatctacccaaactaggtaataaaacatcccatcaccgaaaaagctgtaacatacatgaaatcccaagtagatagagcaaccataacgccccagtaataagatatcatctcgctcaaaaaacataactcaaaagctcttgtgcgcgaagagctgtggcaacatgccaaggcagtgtgttgttttgtacactgcatatgcccttggcccgggcaagacagcccaggtcccggtacatacttaaggtatctttcaggacgctgtcgtgagatacgggaatacgtggggaataaatgagattaacggaggtagcaaatacaccgtccgcatcagtagtgcccttgcggcgaaggagatacccgctggatagggcgggtcggaattcggtgaggtgtggagagctgttgagtcggtgggataggatggctagccaggaatcgtcgcagatatcagtgagaacagtttctgaatcggtttcgagtgacatatccgttggcgtgggggcactataggcggcgggaccggcgctggttggcgtggctgcattgcctgattgttcgggggaagcaacgctggcatttggattaggagtcgacacgggggtagacgaagacagtatattcagcatcgccatcgatacgggtggaaccggtggctcaaggatcaagtcaggaacagtgttgacagccagaatggtcaattccaatgacccaggctttgacttgttgtgctggtctgctagactagcccaggctgtgaatgtgttagcgatatgtcctcgatatcaaaaaaaaaaatacgaagcagtaccttcaacctcctcggtttccatgggctcggtagtcgctagctgaactttccatcgtgcttggaatttctccataatgtgtttcgtcgtagcccaaatctcattccttacttcggaaacaggtctggtaccacccgactgacgataccgcagacagtaagacatggttctttgaatagagcctggcaaatcggaccatgccaccgatatccagcgttgatcaagacttttggagtaggcaatgtgaagacttcggccatcttgaagcggcgaggatctttcaggagcaagtcggaaacttatggctctcggaatggcgtcggccaaaagcattggtggcgcacagagcagggggctcatctccgcatcattggagcgacatcgactgtagacttctaaggccaaattcaaataatccacctggggaggtataaccatcgtttcgcttgacatcacgaactctaggggaattatctgcagaacaagctcgttggcaattcgagtctgtcgtcgttcggaaccggctaccaattgttggaaaaggtaccagaaggcggaacaaatgtcagccaatgctgcagcgtgcgtaaatgggttgataatatagacaacatggttatcagcagttgccgtagactgtgagagctctgagccttgggaattgttagtaaagcacataatcatcagagaaaacacataccaagctgctcgcatgttctcttcaatacctgcatcatagattcatagctagatgtttcagatttccatagcttcagcccctcttcgaatgctacagaatcgtctcctctggtatgagttccaagactgcaactttggtagagcagaccaaaccgcctcaagaaaacatccgctgccgttgacgcagctggtgggtgaatacaataagcagaaatgttctttggcccatgagcaggctcaagaccgaatgtctcccaaaaggatacagccgggggaagcgcctctaagtattctttacctcgacgcacacgtatatgaggcgccgataactttgaaatgaagctttttggggggtctttgggcagcgcctgatgttgtggcggttgctgctgtggaagattcgcgacaaattcatcctgaaatgacgtatattttttgaagtccattctcgaggtctcgcccaagagtgctgtgtcgtcgagggcttgcagtgacaaagactcgctctcgagatcaaaaagaccaattttcccatcaagtggatgcttgagggaggactgcgtaatttggtcaaccagaagttgggcaatttcaagttgaccttcatggcgaggaagaacagggagttgttgaggtgggaaagcagagaaataaccggtgagggtccaatcggaaaaattagctagaaaattgccgaggaacgtagagttctcggctgcgtacgcaggatttgcttctgtgccaggaaatgacttctcttgggatgcaactgacattatatcggattctgaaggagctcgtttccgcttcaaagaggggatcgagggcatggctgccggcgttggaacatgctccgacatgatctcgatactatcgtcgctgctgtcactgctcaccgaggctgatcgtagaccattttctgactgaatcagagatagactggtcttgttacgttcttttgagctaggtacgttggcgttgcttctgtcacggcgaggaatgccaatcgtgggtatggcagatgtctgatttaatgtgtccaacgagttaccaccggagaaccagaatttgccagctgctccgtacttccgatcccaatcaccaagtttcttttcgaatgccactgggtggtaatgcccttgcccccggtgacccgtaggctgtcgacgatcgtctgcctcagaccccgggaacaatatcttcttcacttctactgggctcaagggcgggctgattgtttgacctgcgcgatccataggcgaatgagctgattcttcgggggccatgggccgttcagataactgtggtgattcgtggtgtatcggagaggcgtgtacctcatgggtttccaaatgagttgggatttcccgtgactgattgggggagagctctgcatcaaccatggcctcggcctccgattcgctttgaggacggggtgcttcaactgcttcatctgcatcctctacccgagagtcaccctccatgccatcgaaatcagggtcatcgaaaaagctgaagtccgcatcggtgatacctttcgacccaaaatctctttcgttcatttccccaaagagatcttcttcgtcgcttgcatcatatcggccagtgccaattccaacgccactattttgaacgggtgatatattagatcctggcacatttcttcttgaatttcgttgcgttgcatgtggtagcccgaagtcagaatcgtcggcaaaagcctcaggagggtttggattgttcaacccgactgctgcagctccgtctgggggcgttggatagacaagattcatggtttgcaaatcaggatattgcgcaattcgggataaactctctgtggtttccaagggttcggccttgggtggtgatgccatttcttggtcttttggtcgtgagtcttgggtggtaggggtgttttgagcaatatgggaaatatgatctagcttgagagagctcgccattgtagaccattgctctgcaaaatctagaggttcgtcaagaagggaagtttgagcatcggaagagaaatttgatgagctagcccttctgaagcaaaatctcgctggccacagcatgcgtttcagtggcagtgcagattgactatcatcactctgtcgccatgcttccccagcaagcctcgcgaaaaatggctcccaaacctccacttcaacccagggttcttcatcaattgagtcaacatgtaacccaaaattccgcagccactgcacaacatccaatttccactgtattcttttcgcagacagattcccaggggtggggtggcccagagagggaacggttggcgagtcaatattagccgtgacaagtctagcgatagtcccgctcgggcatagccaaagatcaattccaggctgaacgtcggttattttagaaatgtcgtcgcgtggactgcacagtcgagttatgcccgtttgggatacagtctgggcggagacagttattgttccacttatagttaactgaacattgagtgtagtcaagcaagaagtggagaggatgctctcattgttgatatgggggctttcgtatcctgacttttcgatggcagtgaaaagggttcgtgatccgaggggcagagcaccatggcgtctaatcaactggaggctaattgaaccggtgacagcagatacaaaggaggcataaatggccgctgaactgctgtaaccatcttgtcgtcgagaggtaggctggctctgatgtggccgtggctgtgccgcgggttgggtaccgttctgactctgattgtcggacgacagccccttcactaagtccagcgaggagacacttcccaatgcagagactattgtaataaaattaacaaggccccgaataagtctacgagctggccagagacttacctttcaaagttgtggtaccaacgacgatcttatttgactctgtgtcacttcccctcacatacaaaggtttgaggctctcgaactcgggagtgggggaaaacacccaaagccccaggcgccttggacatgaggccaggcagttcaaacccctcaatcgagcctctaaatctttgagacgactcaagtgcttgagaatagtgtagccattggcggggctctcttgtgggttatttgtgataccagcttcttctgtgtatattctccagtagatgttggagaatccatcctgatgtgacgcgtcagcatggacgcgaatgtactgtaaatattacgatactcacaataagatgtatgttggtgtttgcgccgccagggaagtccataatttaacggtcgcggacagccccggaagcttttaaagatagaagaaattccgatggctgactctggaagtcatttccaatcgcaggttgcatggtctgtgggaaggagtgaaagcgcatagcagagagatcggaaagcagcgaatacattagctgattgataccatattgcgcgggacgaagtgatcaacaaagactaaaaaggtctggcaaaacactgtctctcaaattaaatcagcgcaccaaatgaagcagcaaatctttcaaccacaaggcttatcgcatgaagccaacagaaagttgagatgcgtaattccgggggacgttcgccagggacactcgggccaatcaccaggcccatgtatcacgtgattgctatcagtggcttttatcgcagtttttttttttatcttttgcaggtctgctttcgccgacaccgataggttgcaaacaagttgcagatcagctcaacataactggctcggccttccttacactagaatataccagcatgaagctgtccaacccgtccgaggtcccggtatataccatctcgggttccgacagtgctcgcccgcttcccgaatggcttgctagacggcgcaagcgcagcttgaaaaatgaccccgagtatgccaatcgagttgaattactgcaagactttgaatttgaggaagcaagtcattgtatccgagtcagtgaggatggagattgggtcatgagcacaggttcgtactaatccccatcttttcctgagagcgcatacctaacactattatttgcaggaacttacaagccacaaatccacacccactaccttccgcaattatctctctcatgggcgcgtcatactagttcgctcaacaccacgttcatcctactgtcctccgattacaccaagtccctccacctccagtctgatcgatctctcgagttccacactccctcgggctgtcactacactaccagacttccccgatatggacgtgaccttgtctacgaccgccagtcgactgaagtgcttgttcctgcagtcggtgttaatcaagatggcatgggagaggtataccgattgaacttggagttgggacgatacatgcggagttttgaggttgacgtcggaggtgacgattttacatccactggtggcggaactctccaaggtggaatcaacacgggagcggtcaacactggtgctattgcggagcagagccacaatttgttggccttcggaacttcattgggaacagttgagctatgggatcctagagccaagggacgtgcaggtgtgctgtctacacccacacaacttggactacacgatgggcgatcagagatcacagctctagatttcaatcgctccggaatgagcctcggaaccggctcgtctaatggtctaattcacctctacgacttgcgttcacccgttcccttccaggtcaaggaccaaggatacgggttccctattcacactctccaattcctcgagccgtcatctgcaacacaagctgcgacaatcgaaccgaaattgctttcatccgataagcgcatcatcaaactctgggacatcgaagatcaaaaaccttggacttctgttgaaccggctgtggatatcaactctgttgcttggtgcaaggatagcggcatgctcctcacagccaacgaaggccgacagcaacactcattcttcattccgcagcttggccccgcgccaaaatggtgctcattcttggacaacctggttgaagaaatggccgaggatccaaatgaccccagcgcattcaagtctgctcagtctggttctgtctggcccggtttcacgcttgtgcccagtgaagaggtcgccaaatgggacgccaagctcatcaaggcaggcggagatcccattgatttggcagcttacatgcagtcaggaaagatggtaccttactctaagggttatcaagtgtcgaactttgtttataactctattacttcgttgttccccgacacagaaaaccctagagcgaagaaggtggctgagattatgaacaaggagcgggagagccgcatccgcggcaagaagaaggttgctgtcaaggtgaacaggagactggccgagaggatgttgaacgcggaggagaagagggagcgcaagcatgccaaacgtctattggaaggctcgggcgaccaggaaatggtcgatgctgctgcaactggcgaggacaaggtgttgggtggtggccgtttcgcccagctgttcgaggaccaagatttcgctgtcgacgagacttcacgcgaattccagttgctgaaccccagtacggttccccaggccgctgccccatcagcttcgagaaaggagcgtggcttgacggcagtcgagcaagaagccatcgacgaagtgcctggctcaagctccgactccgattccgacaacgaagcggaaaagcccgtgaaggcagcagtctccaaaaagatttcttctgcagactacaagcggacgaagcggcctccgcctcgtatgcaagtatcttcctcgaatcaagccaattccacccgagaccgctcctttggctctcgtgcacagaatatgaagtcgaaacaaaagcctgcacgacgggttggtgtagtcggcgagcaagagatgagcttcaacccggccgggaagccgaagcgcgctgcccccgaagtgcgctacgacaagaccgacacatcgttccgagccaaggaacgccgcagtgcttcgggcaacactttccgcaagatataatatgtcttgccattattggtctttttttatgccatttccttgacaccatacaatcttgtccagccaggttttctcgcctcaggtctacgaatcatgctcctagcttctttgcctcccacttattggcaattaaaggcttacttgctggcgcagctgtccgcttctggctgaactactgccgaacactaggactgagctcattgacaacctttattgcttccatgcaattaggcgttgtgcgacgtgctgctgtgttgatccccgggacgcatttctttgaacctacggcaactttaacaataccctattttatttgcacactgcctcaccgtcatagacggctttggtgtgacgcccgagaagaaaaagctctggcacatatcttcgaacgaccactttgtatctaatgtctcaaaagcgatgccaaaacaatcttgtatattcagctgtctttgtcactttgtttttcgtaataccctgagtaccaacgtgattgtggtagagaacagtatatctctcatggacaactatctcctttgaggaggtgggttcgagtgcatattgaccctcctacaataagtttcataattcacaacttacaatttagatactttccttgtgaatatttagaattggtactttagttacaactgtttgttatggactggaggggcaatacccacataccagcaatacagattgactacgtactttagaaattggaccaatgaacaatgcaatggtaaaagtttccaaccctatatcatgaggtgtttatctcgacactctgtccatgataaaatcgctggaggatgtcgtgatttatgttattttatagatcgttgcctgaggcgacgatgaagtaatcgaatattagcactaagcctaaaagggcattcgtgcaacgtcgaccctgccatctaatcgcgagcccccaagcccattgtttttccataaattcctggtttgggcgtggtgcttgttttctgttctcgtcttttggggttgtgccagtttgcctgctccgcttgagccacgctcgtttctcaacagaagagccgattgacagcaccgtccagcccctctaccaacaattcggggtgcagtagctcctcgcagggcaagccgacttcaacgtgtgccgatctgcttccaatgtcctgaccccatcataggatctgactattgcactataaacagtcaacggcactgtctttcacctgggggatcagcctactgtggtctccgagcagctcacacgtggaggctagagctataggtctatggcggagaacaagcgccaggtttcagtaaaggcctctgcgcagaaacaatctggtaacgcagcaggcccagggatggcgacacccatcgtggccttggaggcagcgctgagcggggcgatcggtgcccggtgagtcttatctgccaacgatggtgtctacaaagtcgcagcgctgacctattccgttctcgcgttcctagagtgcgtatttctacatcgcagccgaatcaatccactttcgaaggtacactgttcacggcatgcccgatcaccaacctcgtggccatcaacacggcccccgcacccaaccctggtgatgccaaacaggcgcagaacggcgactaccacgtgatccccatctcgcgcatccagcacttccagctcctcgctctggctccgccctcgaattccagctcgtcctcgttcaccgacgcacaacccacgattcaggcactcgacacccgtgcgctcaaggcccgcgagtccaaggccatcggtgaagcgcttgaccgtgaggcgcgtcgtggtaagggcgtcactactcaggcccaggacctatttgatgctttcagccgcactatgccggcgcgatggaacggccacagcatcatcgtcgccgatgctgtgacaattgctgctccttaccgcgttgatgattgccgttcgattgcggagggcgatacggctgctcttaatcgagtgcgcaaagtggtaggttatctaatatactcagtcatcaatcgcaaaacaaatcgagttaacactgtggaatatagctcgagatggagcgcaagaagatcgagcttcgcaatgccagcgctactatcggttcgactagcaccttctctcgccaccccagtgtccccaacgaccagcgcaaaggtggctaatgtgctcaatcacagaaataccagagacgcagtcctatgaaattgtagataggtctgacgtcgattcgagcgtcttggtggcgcctgatcagcaaagttaatggaaatacccaagcgaaaaacgacattgcaatgggatagagatgatttgaaagcggatccgacgggacactgcgcgttcttgaccacttgtgtctgggagaagatgccccccccttatcaagaaactatatgccgtggaccagcattgcgcgggctctgcttgccgtcgagttggaccgttgcattgctgccaaccgaattgccttgtgtcttgtttttgggcagtcggtgcgctcaagccaagaatacgagacaatccatagtaacctagtcaattgctacgacaacactttcttaggacaatgatattgcacccttcagccactgaaacttctgtaatgtgtcttatttcgacaactgctagcgacgacgaacttcaaatattggcaaacatgataatgaaatgaaaataaacccgctatgaagattgaaagctagatggttggtcgaaggctcgaaaagacgctcataaaaaatagagaagaagtatgtcatcaattgccgcgagatatttgcaagactttagtctagctctccgcaactggaactctcccaggaacaatctcacagacagtccccacaaacccttctaaacccgacatggacagcgtcccagaagcagagctagaaccaggcgcagacgctaccgtagccccagaatgggacggggcagaggccatggaaacaccaggcataacgagaacctgagagccaagttccacccattcaacagacgacaccagcgcaaaggtaatcttgacgtcttctttcagggcttctgcggaagaagcagctccgacaatggaagcagacgaaatgccagacactactttgctgatatctgttgccgagggacggcggcgaagtacatcacgtgcgccgccctcggtattgcttggtatcgcactgccgtttgatttctcactaggggaatgaggatcgccgtcaaagctgaagaattcaggttctgacggggaacccggttcggaagatatgtcctcgcctggcccagttaacgccatgcaaatgacacggacggtagctcggatattggcgatgtaggcaatggcgttaccgccaagcaagagtggaggtgaatttggagccgagaactcagtggaccggaaggtagcggtaaagcccgtgtgaaaggggagcgctagtaacgaggtaccattcgagtgcgagtgtgggtcgtggaagttcgagagaatcatgcccttgcggatccggccgaaacgcggtagacggccatcgtctgaaaccccgatgggttcgattccgatggttccgacttggtctctaattaggcggcggacaggaagccggaggtctcttacgctgacaacgcggatacgctgccatcttgcttgggaatctttaccggacaaggaagtctgcgggaaggaggccgggaaatcacccggcgggccgggcccactgcgggacagtgacccttcgggtggttggggctcattgcctagatcgtttggaacgtccactaagatggggccaatgaccatttcgtcgccgatggaaatattcccgcgccggactaggccgcagagaaccatgccgcggttctcttggccgcccttctccgagtccagtgaatagactttggagggagggattgcaaacacttcatccacatcgaagatattagtggggctgtgggagggtattggcggccctttagggatgtggagagttctttgggagggtcgtgggggaatgggaagagagcggaggaaggcatggagttttccaatgccagtgccatccacagcactggtaagcatgataggtacggtatatgcccattttccatcagccgccgcgcatactttctgtacttgggcgctgtccaacgtgctgacttgctgaaggtcaagtggtttgtcacctgcaggcgatgcaggtagcattgcaggttggcgcccagctgttttaagcgcagaaagaactcttccaaggctatcccgtagtccactgcgggaagcaacgtccaatttggtgatgacaatcaacacaggaacctccaactttaggcaaagctctagatatgacagacacgtatcaatttccgattgttcagttcctgtctgttcgctgccagatgtctcattgccacagttggctggaatgcataacatcacataatgtggagcccagctgataagccctcgcagggtagatttcaaatatcgaatagagcccggtagatcggacacaaaagccaaacgacctcccttcgaggcggcatgaatatcatcccaacccgcaacattaccggaagcatagttaatcacggttggtggcatctcacccgtgtacccaatcagttcttgggcgaccgaactggtgatgcccgatgatatttcatgtcgatgcttgagcaggcttaatctgcttttgcctcttccgttgtcaagcgcagacgaagtcaacgtacccagtaaggaagtctttcctgcggtgcttggacctgcgagagaaattcgaatctgctctgtatgggagtaatcctcattcatgactgactttctgccagattctgggtgtgcggcagatttcgtatcgttcttggacttggttggagagatattgtagaagtccaggtcgggactcaccagagcctcggcgacccaaagactttcagtgttgttcttggtttggttcccagtttcagatggcaagtcttcaacccattcacactccccaaccacaactcggcgaaggatctcaactttacacccaatactagcagccatagcccgtagattggtcacactctcgtccaactcatcctgcgtgaggcctacgaaagtaccatcatcgccgacaccgatctcatacaaagcaccttggctttcttcaagaccgggaagcaagcgggccggtttagagggcacacccaattccagggctgcctcgggaagaacaggcaccacaaggttagaggtagtggatgagtgaaaaggtgacgattgttgcaaacgccataatagctgggtagtcaacccttgtagtcgttgatggcggctctggctagacttggcttgcgtgtgtcttggggttggttccaagctcggagaggatggagtagacgtacttggcatgacgcggtaattgtgatggtacgaacccgctattacatgcccagtcgacattgagagatacgggcgcctggctcgaagaagaaggtgcaatttgtactcagtgggaccctcttggggttcgggttccaatttggatattccatagttggataacaagtcagcgtcgacgcctagtggactggtgctagaacgcgtgcggacagctaaaccccgactggcagatacattgatttggggagtcgatgatcccgaagttgaccacggggacgacacccgaggtgggtcaggatcataggtgaatatggatgccatagacacggttacgattcagactggtaacaaagatattggtaataagcaaagatatggagatagataaagcaattctaaaaagactcgagaaacataaggcattcttgcagcagaattgaatgatctgtgatgcaaaagtgctgtaactgactcacaaatggcacgggccgaagcatcacgtggcccatgtttgtcccgtatttacccagcgccaagaaattgtatgagaagttctatcaagacatcaagccttttctctcagagaattttttggcctccccaaatatacatgcataataagcaaatccagtcccgctatagccaagcgccttcgctttaacgccgaaatcaaaagtgtgcatatgctctactcagcagatgaatctctgcctgagcttttacacttgccctgcccaacatggatattgcgtgctgtcgtacgtgtaaataccgcaccgcatattgggcattcagccttagccaccactcctgacttttctcgctggtggcggagaagattgctgaatgttgagaactcacggccattgcagccatggtcccagcattgtggtcgggggcgcaagctggatactcctgctggacggtcagaatcagtagcggcggctgattctggtgaagagtacattggttcggggaccatcgattgtggctgagagctgatggaggtagggtgcgatctagtgtggtttccggtcagcatactctatgattcgggttcatcgtctcaactcacggcatgtccggtgtagcggggaagtagtaggcatgttggtttatcatataagcggaaggactacccctgcgttagctgccagatcattggatcttttatacttcgagcggttcatccgacatacgatgtcatgagaggctgttcggactgaggagtgacggaagcagattgagggtggaagggatgggggagaggtgaactaaaactggaaatgtcagtcttttcagaggccaggtaatcaatcggcttaccttcgaggttcactgtgacgggaaggtgcgagataagacgccggtaattggtgttcttgctgttggtacccatgcagaggcccatttgggtgattgggatagcccatcggatagcccgatgcagggtatgacggatgtgaagatagaaatggcgggctcgtctgttctggttgcgaaggttgataaggtcggtttgtccacgcatattctagaagtgtcagtagatcatcttttaaacaacgtctgggtgaacttcgtacggcgagtattttgctgcactgggccagcaaaataagagtctggtactactgacatggggtatgatggaatgccaaggctgttgagggatgccctagtcagcactgaatctggccctgggggccgtttttctcatggattagctcgacatactgtgaatcttctgtgccaatttcttctttagtcggagatttatcctcgatatagccctgcgctgtggactctgtaggtggatagttcgaatctagagtgtgaagcggactcgtgctggtattcagcgttgttgaatgatgcgcgggcagtgacagtgcaaatccttgtgttgactgcgagccacccggtgcataaatcgagttctgaatatgctgaatgggccagtgagactctggtccgggaacgctgtgtgaaaagtcgggagattccactgactggactagtggagacaaaagtccaacgttcgattgcgaagctgtgaatggtagatttgattgattcctgcgggaagagaatggatgctgtgagccagatccttcgggaaacattaggaactatataggtcgcagaccagtgagattgcaagtactgcggtagggggtgggaggggccaaggttgagtataaggggaaaggtgggactcgtaagaggaagtcgacgtacaggtttgaagttccgatccgattattccctggtggtaaatcaaaagcggttttttctgtgaggacttcaattgggggcacggaacgggcgcgatgaagtatttaaaagcgcatatccagcaacgggcgtttactagtgacccccgcaatcgtgttatgatctgaaaggtcccggttgggtagcgttgctggcccacacgtttagaaactaaacaccgacttctagatttcttgcgcgccactgatgcgcctcgatcagggccgggtctactaaaacataccctgacgtcccactacccgcttgttcaccgtctcaattgcatatatcagggccggtcattggctgtctgatccgtcggaagctcaatgagaaataaaataatgagaaaaaaaaaaagaaataaggaaaaaaagaaatcccaggatcttcaaatgaggtgggccgatgggaactatcacgagcagagtcggacttttaacccccacaaatcacgggtaaaacagaggatatgcgggaaaaggactcgggacagattgcaactggggccatcgtctggacagtcatgatcctagacaggggagatgactatcctggcctaggcattggattctagcccccattgtagcgaatgggggcggattgggggccatgacgttctcgatagtctagcgcgtgcctggatactccgagatcccaccttgccatggccatttcgaaaagaaaaggaattatgccaaatacgaaaagcgaaacgcaaaaagcgaaaacgcgaataacctgaagtcgccagttccaccccggcccgaggcttgtccccctatcagtcttggcccccacaaacgcaccgttgggaaaaataaaagaaaagactttacattgtttattaatgaggcctatctgggcgtatcacagggtggacggagactaatgcagtacggagtattctcttccaaaggggacaccctaaaaggtaccgtccccatctagcaagtcgttaaataccctaaacaaatccgatttcagccccagatagtcccattccagtaaagatcatatgtacagggcccgctctcggttccttgttagctccggaatacttccaaggtccgctgcactggtattataggtgttagatcgacacatatccggaacgttgggggtcctggctattataggcagccgtgtatcaaaatggaaaagccgtaagtaatggtggagcttgtcacagaaaacacggaggctactggtaatttgagggtcatgatatggtcttcgaggatggactctgattgagtccttccaaagctattcttacttcaaactggcatgcttgtcaaaaatccaatcgcccctaggatcaggcacggtcatgatcggctcactccacaggggatccgcacttgtatccgttggcttcaggacatgtgcgatttctactaatgcacggttgatcatttagtgcccgattacagagtatgaagtacaacatactaggaattaaggatgttctgaccgttttttaaaaagcgtcgggatctacaatgtatggcgatctttgggttcttaggcttgggatcaacactattaattgacttggccaggaacagcttatccagcccttcaatgcaaccttggaaccctggttctcattgatttggtttcttttgatgcatcctttgtgttttacattggatgggctcacctactttgaccaggttgtaatattcagtacggagtacgccttgctcagattcctgtagtatgtaggttataaatgccgcattgggctggtgctatcaaatggaacaatcggctattcctcccccattcaactggcataaatcgcaagtctgtcaaaggccaagagagaacagatttgaaatcaatcgctcgtagccattcattttgtgggttcaggatttgtctaaaaccaatatgcttcgctgtacatatcactctgcaggatgcaggtcaaaaaccaaggcatatcaggaaaaatacggaccgcaatcccattgatcccaccttgacacaccgctcacctgcatatcaacttcaaatgcacgaaagccgttagagctcatgggacctttccaggtaggagacaagttggagcttctggaaggtcacattgcctcctgggaaggatcaaagaaccaattctgcttgaatagcctagaaatcgaattcctcggtggaagattggtcttggctgagcatgtctcagacgatcggaaccagtatggtgaggataaaggctgtggatataatgcggtatctttatttcattatttcaataaacatacatagatggatgtccatcccagttgcttatcgtagcgataatgaaattcgcaacccgtggacctcgagatgggaaatccaaatcacgtgatgacctcacctcagatcttctctgggctcttggtccaacagcatcatcgtaaccaacgcgtttttatccccacgatctctagctatctgctagtgtctcacaacacatcaaactgagaccatagttagcttgcagcttcctgattcaccatgaagctcgtccggtatgtgattacctttattgtgcgcggcaagcagctcgacgcaccaagcaaccctcaaacccactcctgctgacatttaatgatccttctagctttttgatgaaatgtgccaatgagacggtgaccgttgagctaaagaatggtgagaaaccccggcgcaatccccgcaatccccaacctaaagtccccacgaatatgccaatatgcgaaatacgcgaacgaactgtgttgtctaacttaactcccgtatctaggcacaatccttcacggcaccattgtgtctgtctctcctcagatgaacaccactctccgggctgtcaagatgacccccaagggccgcgaccccgtttctctcgacaccatcaacatccgcggttccacaatccgctattacatcctccccgacagtcttcccctcgataccctcctcgttgacgacgcgcccaagccgaagaacaaggcgcgcaaggagacagaccgtggtcgcggtggtggccgtggtggaccacgaggccgtggaggacgcggaggtcccccccgcggtcgtggtcgcggacgtggattctagattttctgttttctatgagaaccatccggcgtttgtttctgtcttcgcaatcggtttgattttgcatcatatgggctacaatgtgttgttccttttttctactacccaggccaggggtcccgatatggatggtgggtgacatactgaaaaaattaagcaattttaccggggaatgttccccactctgaatttgcgcttctcaataccgtgtacctcaataccatgtgctcaggtgaacattagctatcaaaagtactgtggaatcacccgagagaaggatacatacgatctgtgactagatccaccttcccttcgtctcttatctctatgcacggttccgggccatgtggtgtgaaggcgctaagggaggctttggccaacatcaggccacagcaatatcgaaacagatatctaaaacgtcatgcgagtatgtgaacctaatatcgtaggcatgtccgactctcgaataggtctaggtttttctctaggtgtaattcttagtgtcttctagcgtgttccctttccgttaaactcaaagactcggacacgacggtcccataacgatatataacgcatccgagattggcaatgccgagaaggttatttaaagcaccgtggactattttattctttttctttttaaagttctcgcgttgagcacccacatttagtggtctcggaaaacccgctagagccaaaatcagcaagacggcgtcttcaatagcacattctgtcccaattacctagttactacctaattgtggcctctcggtgtaatactacctctactttgacgttttgatacgaggcttgctgaagaggcttgctgaagttacgggagttataccctataaagaacgaaggtttaaggcgtgaaaatatctcagtggaaccagaccaggggaataagctgcgagtgcgcggtttttttcaaaaaataacatgagacatgagtgtccgctcaatagccttcagccaatgctgcaaatttaatccgattaaggctggcaatatcttcccgtgcctcctgagctctccaaggtttggaacaaccgggtggctctgagaccgttgccaagatatagaatgcggtatttcaaaggataccggaacaagctcccgagccttttggatcaataaggtcaataaggatatcaccgtagtccctttcaagctagaggggccagactctgttgatccaacaggattgattgccacggtcgacttctcaccagctccgccaagcgtcttatacgcggtatgtggctgataaggaccttctatttcaggggttgggttcccgtgtgcggaccatcccgtgtacatcgctcaatgatcaatcaaagccatttcggttttgatttccgaaagccgacgtgaaaaggttcgggatttggaatctggtgaaaactggatcgacgaactataaagtgctgctaacgtatgttccagtgtgttctttcgtcttttctttgtatactccgtacgtatatacgactacgtagcattgcttggaattcggatattactttcctattttgtgattggaggagatcatttccaagcgcgtcagacgacgtgatatcccaaagatcatctatgcccaagccttcatttcccagttattccatacaaattcgggaaatgtttccaagacacatctttgatcttcgctagtatacatgtaacaccgttctgacccccttagcacgacagcgccgatctcaatgagtagccaaatcacccctgtacggagtacgttagagtgggtatcatagtgggcgtccttacggagtgctgttcgacgtccggctcggtcccggtttgttttacaaatgtgggggccggaaaaggggcattcagatcgtcgatctactctcgatctgtcatcgatctgaccacgcgctgttagaaaactcccatacgtgaagcggaaattcgcgtttcacaataagtgatggtgcaatgttgaggcctgagcaggcatggtgctatgggctatgggatcagacgatcgagcgatgtgacagccgcccacgtgggcacgtggagactcgttgaggctgtggagactaaatcactcattgattgtcagagttcgcgagtcgttccaaggtttattctcgaagcaaggcagtgggggctcaattggacaggcaaccaattacattgtcgatgttgcataagctaaattgcaactaatgggacgatagccatagccctaagtacaacctaaacgagtaggaccggatcagaaaaaagggtcgacggcccacatctatgatttgttcttcgtatctacagagtatgttgctggagatttggagaatctgttcagaataagcgaagatcagatgattgtatctaaagcatcggtctttgtcttgtagaaccgacacagtggagttatatataagctaacaaagtatataccacgacacctcatgtctccttatttgacatcaacggatatattatgttgagaaaaatagtataataaagttatctgcataagccttcctatgaaagccgatatatgcaatagcatgcacaacggcagaccagatctagtactctagccaacgtaccatttctttcattaatggttatgtacttggattcttgattctcggcccggtcatcattaagtacatacattctaaaacgacactccaaatgtccaaatgtctaaacgttaaaatggtacaatagaatcatgcaatgtatcatccgctaatcttgcactttgcccttccagctcagctaattctttcaatcgtggatgtaccacttgaacgccgtctttctcaaagaccggattggagtctaattcatggatcgcatacggcggagtaagcttcttggtttcagcaagttcggatcgttcctcttcgccatctttccatgggcgttttcatccacggatccaaaaaaccaatccccagaatagccaagataacacctaatgcaacaccaacgcccgtgcctgtttagcacctgttgaaagctccggaggtttctcttctgactcttgagtcactgccatcatcgttgtggttgttataactgctgaagtcgtggttgaaacaaaggacgtaattggggccgaagtaaggtcagtagacctccaacggagctcaacaccatatccgtaccaactatcgactcccgatgtgataggaatggtgagtagtgtagtaccggttacgtttatatgtttaaacgtctcgttcatattgaccgtggcaccgaattcgcgaacctcgaaagtggcgaattggtccatacaacaggcgcgtgtagtgaatgtccagctacttggtctatagtagcgttatattagtatgtgtgtatttcattttcccaccgtcctcatctctagtaatgccaattgcttactgataaacagggcagcatgttcctatagtttcggtggcgctggtataatttacggccattgcccagccgctaggacaagcgatcctaggtgaatagtatgacgatggggaccagtttgatgggagacatttggcatctgcaggacctaagtttgcccacaatgatcttgtacctatgggtgaggcgtttaataaccagaaatccgtgagacattcaatagccagagtaaaggtcgtcgtcagtggaagatgcgaccgcgtcgtggttatcattgtgggaggagcagtcaaacaccaaagcttcggacgaggaagaagttggaagaggaataggataggcaaatcggggttgatgaaatgacaggttgtaaaagcaactagactactgtgtctacccgtgtccaagatgatatgcggtccatccgatacttacaagggggaaaatatatgacccggtgtagaggtatggggaatgaattaagtaaggtataagcaatgaaatggtcataaggaaaagccagagggtcatatttattattcctgctgggaagtcgttgaaacctgtcttcagaaaacaatgtagccagctagaacgagagccttgtggacgaaacgcgtttattgagagcaagccaacacccgaaaacatctagataggtagcatagtcaaagtaatatctaactagctttcgccatccagtctatgcgtagttgacagggcgtcaacgtatgcagtcaaaaccgactcactagaggtaccataaacatgccgaaaaattgctggaagatagagtctattggaacgatgttgtattagtcggtataatagtcattatactgagcatatcaaggcagacaactcaccaatacatcatccagagggaatgagttaagctggattgtctttaaaactcgaattacaatcctccgtcattgtaagataagtagccctggaggcctgtaacaagctgatcaaggtatttttctaagtgattcgtttcatctaattgtctctgctcgttcggcggtagaaataccattcaagaggtgatccccgacggttgcacgcagaaccaagtcagggatcttgtgagatttgagacaatcgaataatacaagggcgatgtttgctgtcattatatctttggcggtgaccttcctaccaatttacccagtagggcggtcatccacggtgtatgggaccttccttattgggacatctgtcgttcgttttttctttcattcctcctttttccttccctttctctcttcctcctctttttttttcgcttcgtcccttcaacctgttgtgggcttccattttcatcaaccttgcggaaatccattctctcatcatgtcaagcttcgataagttcctcaatcccgcattctgtgcgaataacacaagctcgccatgtcccaacaagacctcccaggctaatagtgcttgcggccgctgctacttggttgtggtaagtctccaacactttgatcttttcaaagctctgcaccatattctaatcaaaatcaaaacagtattgcggcaaagaatgccagaaagaacattggcccatacacaaagagaattgtaaggacgctctggggtatgagacatggaagccagactggcacagaggagatcgaaagccagagtttttgaagaatcgagacccatctgaacggaatttgaatgacggcaaaatatcgtggtggggaggcatgccagcattggacttgttgaaactggatagaaatgaaggccaggatgcaccccccaagatgagtgttcttctcacaggtaagagactgtctgaattccaacaactgctcttttgactaacacaattcctgatagcatcacacgatattcggaacgtagtcgagacaatcgctcgtctgccagatacctattcggggcaatgtgagatcgtgatgaatggcatccacgctgggattttctcgcagaatgttcttcttgttctgacagctttccattttccaccagagcacgctgccattatcatgattcacttatggtattcagctttgatacccgcgtctattatcaccgcagtccgaaaaaagctcctgccaaagattgagaaagtctgctctgaagctgcacaaaaacggtctcaaccgtttttcaagtgcgtctggaggaagaacaaagcatccttgcatgtggaacttgcgagagatgagtgggaaggtcttaaaggataccttcaggttcctgctgacttttctgctaccgaagccgcctgcaatcgacgagacgtcatgtttgctgacaatagaaaggatgaattccaaaggactctatacgcacagcctagatactggcgtgtctccactatgaagttccgcgatgatggaatcatgctgcctttcgggtgctcacgcaaggcatttgacactcctaacccgttagtctgcccgacctttcattgtacctgtcatgtcactaatacaattaggatgtttttccataccagtcgtaattgacctatgccagactctgcagatccgcgcaccagctgggacctcctggatgtatgcactggagcgtacactgcgaattatcctgcgaagaatgatctgtacggtatgctattcatctacctccgtaagactctcttgggtttctgtcgccaaatttcgaaacgagatgtaaaccttcgacttctttctatcgattcactaagtctaccgacatatttcaaccagctaggcgaacatccaagatttgacagaattgatgtaactcctcccctaccacccccacctccacctccgttttgaattctattatattcttgagacaatgctaatttgatatagacgtatgtggctgcagaaaccggcgtgcttgggatccacaccgtcctcagggtatttaccccaatgctgaagccgaagattcaaaatccaaaggccatgcttcttaccctctttatccgcgacattgaggatatgtggaccaaggactccctcgacaaggacgtcgctcgtgctgtgaaacacctccctcaacctgagtcagcggctagcaatgatgcagaccaggtgagaattaacagatcaagctctttcttctgcaacgtcagtaaaatgttcgatctttacaaaaaaacctttgaatttgacaaactcaccccaacatttggattgaagatgaggggcagcaccacaatcgtggcccactggccaatgcgacctggaaaacacgccgccacgacggtgtttgagattcttgagggatccggcgccactggctgtgaacgctacgtcgaatgggaatgggaatgattatttgcacaattgcaaaccaccaagcagtcaactgctgggtgtgtgtatgtatctccttattcttactgctcatgaatccacaaatggtatcatcgttattcaattatccattaatcatgagctatctcctctccatatcctcacaatgaccaatttctcccacccagcctgcatcccactcgaccccgccgtctcagcgtgccaactgccccagcaacggacgcgttccataacctcatcaggccgattctgcttacagagtaagacataagccacacctcgcacagacagcacaccagggatagcatcaagcagtctgtccgtagtttccataccatccgctccgcccgcatacgttaacgacaaaaaatacgagtcattatcgaacttggcagagcgagacatggcctctgaaacagcagggtcattctctgccgcagaaggcagacgcggtagatcctcagtcggaacatagggtggattgaagaggaggacatcaacgctgccagcgcgaagaggtgcacaaagatcggcagccaatgaagcgatgtaaactgattgagacggctgttgctctgcctgaatagctgtcgttgcggtcttctgcgttgcgatgcaagcattgcgattcacatcagtgcctagtgtgagaatatcgcgccggccgaagatctcttgagactgtgcggccgcgaatgccagcacaacgccagagcctgtgcctacttcgacaactagtggtgatgcctctttctttgggaatcttccagagagccattttgattcggatgcggatgacaatgtgtctaggaagaggtatgagtcctcggatggctcgtagatggtgtcaaaggacacatgtgaagtatctggtgtgggaagcatggtgcgtatgtttaataaagcccagtccaggtttatcgactcctctttggagatagtggggctatctcgaaattatatgcagaactcgcgatcttggcctgaggcaatcacaaatttcaggcaaagaatccacttaagtggaagatccaatgtgaagcaatacaataaaaagtatcagcaaatggcagagaaggaaatccaagactaaatcccgagacatcccgacgcgttgattcgttgattcgcctcgccgcctttgcctccaaaatccccggaaattatgtcattccttcaatcctcgatctaaaccctccaatctcctaaatcacctaccaaatattcaagatgcgcattgctcagcgtttattcatggccatgccggcctcgatcggctcgaagtccagcctcagcgaggcccttgccctcctcccgccgctacagctttaccggcgcattctccgcgtccatcgcaaactcgatcccgagatgcgcgtcttgggcgattcttatgtgaagaatgagttccgtgcgcatcggagtgtggagaacccattgcacattgtatgtttattcttgcccgagtttggcgtggttataccgaattgaagggaaggggaggcatagcggaagaggaagggcttgttgaggcagtcactgacattggcaatgatagatcgggttcttgaccgagtggcagctatatgcgcaaaagttggaaggtgattcatgggcaggagataagctggacaaggctaagttggataagatgagtggtatgttcttgactgttgttgaactctgtctaggtcggtcatgctaaacgttggttctcattgtagatcagcaacttggacagttactcgagcttatgcaggctctgaggaacgagggagagggagagggagagggtcaatgagttctctattgatcacatagcacccgaggctgacactaccaccccgagagttggtggctgaacttcaaaaattggctctgagctgcttcatagatctaaacagatcgagtgcagagtgcttgatctcggagcagccaggcgtgcatgatatggttatgctgggagatgcaggcatcttccatcccaccatcagcccatatgtatatactacgtgtaggaatagaagatacgaggtttgacttgatttgaagttttgacaattcaggtctgcacccggtcatatatacattatgtgctattgtttctatatgactatgtcgaggaatcctccaaggttatatagatgcggaacaaccccgagcacacgggatattgacaaggcgaccactatgcacaaaaattaattttagctttaaattcacctatcatctcttatcacttagcagggaaactgtcaatgaaaatcaatctagatactccaacatcagtggagaacgcgccctgttaatgacaagctgactcatgcaaagtcggctgccgatgccgatatcgagatggagaagagggtatatcaatcggaaaacccccttaaccacttgaaaattgcccaattgatcctctgtcacacctcgcccttatctccaagcccgtcccaacacacagatcccaaaaagccccccattcacccaaaatgccctccattctggaagacccctcgacccgcaaccccccaccaaaagcacacctagatgcagcgccgaccctaacagcgtggaaaactaccctccccaagtcctccgcgccgatgacggtctaccccatcacagggggaccgcaaaccgttccaaaggacctgatcaaattcctgcacgaggagttcactgcggaaatcctccgcggcgggacgtacccgatggagcaaccgatggcgctggatgagttcgccaactattggttcggaacgtttgtggccttggcgatcttggacgatgaaggggagggcttaagggaggggagggactgggagagtgtttgtatgggaactttctatatcaaacccaactatcctggtatgtgtcatgttcggattcgaaccaacctcatagtaataaaagcactaactctaataggtcgctgctcccacatctgcaatggaggctttctcaccgctactgctgctcgccgaagaggcgtcggacaggctatgggcgaggcatacctggaatttgctccaagactggtacgacgtgcccccccggctttgcatttgatcacacgcatgacatgcatgactaactcttttggtaggggtacacatactcagtcttcaacctggtcttcgcaaataaccccggctctattcgtatctgggagaagctagggttcagcgttatcggacgggttcccaaggctgcgcggttggcgaacagcgaagaattggtggatgcattgattttcgggcgtgagctgggaaattgaaatggcaggtttcagttttagtttgaagcgtccgttaatgtttgcataaagaatcgccgtttcaagtatataggatcgtgttgttacgaatgatgaaaatactgcgatgaattatacatgacaataaacttgcctagaaagcaagtaatgtgatttcccgagcgaaaagcaaaactagataaaactacaaggaataatattcacagggaagagaagctaagtggtaatcaatgagactcaaaagataaaaccgcgaaatagatgacctcaacgctcagaccataccatgcaaacaatagggatatcacgcaaaacctgacttgtcaagatgatagctccgcttcacactgactgaacaccgatttgggaatagagatcgaaccgagaaggggtgtaatgcacaagtaaaaaaaacatagatagaacgtagatagaacaaggtcgtagaagtgtagatagaagtcggagggcagagaaagaagaacagaagcgatgagggaggcaaccaagttgccactagcgccaccgtggacgtgtatccaccggtttgggggcctgctctttctccgccgttcgcttgggaagcgggagtagactggttcgcctgttcctagaatggcccagcgatgtacctggtcgtgaggatttgcttgggctctccatcccacctggagctcccgacacacttcgactgaaagctgtgggagggcccgcgaagctctggcgactgcgaggtgtgtttgacatccctgattgtcgatagagccgagcgtacggctgtagatcgaaactcgaggactgctccggtgtgggagagcacccgctccttggactccgagaaccaaagcggctcgagacgcgactgactgatcgaagattgccggaaatgggagatgcggaagtctctcggaaagagctggagaatggaattgatgatgatggccgaggtgtgcgggcgagcggggcggatgacttccgcaatgtcgaattgtaaccagtattgctgtcgtccacctttgtactggcgttccagcgtgggcgattgggaattgtagatggcggcgctggtgtacgagaacgagcagccggggtcggtgtgaagtaacttgaggatctataggatgaagttggagacgtaaggcccgtcggttgggggattccggactgtcgaccggtgtaagtcgtggcttgcggcaagctggagtaacgacggtttgggggcatagtcgaacgggctgtggtacttccgaccgaacttccgcgacggcttgagccacccatgggcgttgaggcgcacttgtacccgttgctggtcatgacgactgacgacgccggcgagcttcctggggtgtcaatggcactgcctgcggctggactgtccatagtgaagatgctggagatcgagtctcgtagctggtggcccctggtaatgtgtacatcttcgagagatgtatccattaccttagcgctagccttgagagcatccgttcgggatgtcatgtcggatagtaggcgcaggatctcaccattgacagtcaatcggtcgttgacgcccttttgaatgatggaaaccacacgctcaatagcaggaacataatgcattttcttcgcctcatagttttcaatgagcttgctcaacgttgacgggttgtgcacctgcatgccggtttccagcccttcttgtagcttgccaatactgcgttcaaccgattgaaacatcttttgtgcctgggccccagcattgcggaaaaccagaatccacttgtcttcagccaactccttcaggagagcttcagcatcggtctcaagaactttatagctcttctccaagcgatttcgccggtcctcaatctcttcacacgcactcgggaaaattgtctcagcgcgtccctggaacatcgatagtcgcatgggcaagaactccaacgatgccttcaatggttgcatgcgtgcaaaaatagccatgaggttagagtggctcgtgtcgtcctgcggtgttttaataacgggagtgtcagacgtcgaggtcaagagaggtccaatactcagacgattctgcgaatgtctgcggcccttcatcggggactcttccacaatagtctccagctcattgatatcaaggccaccactggtatcggtcgtatccatcaatgcctgatgtcgcttctcttccatctcaaatatcagggcactcaagttgtcaacttccacgcccacatcgcccagaacgttcgaccaaagctcttcccactccattgccagttcaacctgttcttttacgcctttcagctttttcttaatctgagtccagttttgcagaatgctctccatctggctcacgatagtgttcaagttatccacatccacattggcaatgtcatctcgaagttggacattctcaatagccctaacatacacatcgacgagggactcgaagcgcgtgattgctttatcgacttcatctagcccctcccggccaccagccgcagcccattccacgtcatcttcagaatccaagccgctcaggacatctgaggccttcttgatccaaatctgaatttgctctgcagcgccgttcaaggcccggactgcagacaaagccgtggaaatgttttcgatgcttgcctcgagcgaagctggctgtgggagggggatggaggttagctgcgagagctggttgctgaaagaggcacgggagaaagaatatattgagtcggcgcgctgcaaacccattgggttaaaatatgattgcgagttggacgaagagcgcgagtgggtggcgccgatgggaggcgagtctttgggagggggtttcggagcggactgctcttcagcggaccgttcctctcttcgtgcggtatcatcaacatatttttcgaaatcggtccggtcatcttgaacgtcattgggacgtcgcgagttcggcattggggctgcgcgcggctgcgcgagaaccggctctgcgacagacatgggcgtgggtgggctgatgtgttccccgggctgagcagtcgccgaaactatggccggagtgggcagtttaggaccgtccacaactgcttcggatgactccgggttatctcttcgcgcgtctgcaatctcttgtaggatatcttggtggggaagctggaggtggttcgatgcgctccggttgaactcctcgttttctccaggtgatgtgttggcacgattccacgcctggcccttcctccttaccttgatcgacaggtcttggtggagattgtcaagctccttcaggtgctcttcgggtattcgaccgactgcattggcattccggttctgcgccgcggacttattactgctgtccagcagcttgacccgagccgcgagggcgggagaaagtcggcggaggatggatggtcggccggcgctagtcggctcagcagggacaggttcttcttcgttgttgctgcttcctaagctccacagggatgatttggacttcaggcgtcggagggtggaggtaccggagtcatttggagagacggagagcgcgggggtgagcgatgggggcgacgtaggtattgtagaggtgttggaaggatttgtcgcgaggtcggtcgcgaaaggtggactgtcggctgtggcatgcatggagacaggccctgggggaattgaaagagcaaaaagaccaaaggatgtggttcagacagggatacaaggaatgtttggtcttgctcggtgctcggtaacagggagtccctttttaacgggttaaggctggctttttggctgttcaaagagtcggagagaaatgctgctacatggcaacaattaatagaggttctaaatgtaaagtctcatgaagagtgagatactatcgggcagcaaccattgaaacgaatgaaaagagggataaggtggccagtatgcgctgtagaatggggtacctccagccccgtactactgactatggggcttgatgtacctcctcggtatgtaattcaaggggatcaacgaaatgagatcatttcacttttgttttattttcttcttgtgttctttgttttctttctttcaacggtttcagttgagtggtattcactatttctattaacacaccgggctgtatatatatcaatctcacctccttgccctatatacatatagtacaacctctctgtgcacgaggtttgtcgatcaaaaatgcattaaagaaagtttatatctgagtcattttcacaacttaacccttttccagccttttccaaccgtttatgccttctgcccaagaagagttaggcagggagagaagatatctataaaaagacattgataaaggcatctcaaaagactaccatcgagccaccttgacagagaccacaacgcggccgactaatcttgtaagaaattaatgccaaaggaagctagtcccttctttgtacattccgatcagcaatgagatatcccaatgcggactaagcactataacaagacagggataaatgttcaaagcttcaatctgatgatgcatgtacgcgtcaatggaatgcaacgtgagatactatacaattaatatacaataaatagaattagaaaggagaccaacgatcaagaaaaatcaaaatagcagaggcggaagagtcggcgacaattcaggggtatcgtatcaagtgcacataaagatatcaaagagaaaaggaaacaatcgagatgcaaacacgaatttccaacacttccaacgagccctcaaatcaacccagcactcgggggtcgaccagggttagcctcctgccaatcgcgcactagctcttcgcggacggttttacaccaagccaacagtgcagtatcgaactgctcccaagccgtagtgccactattctgtacaacacccataacatcaacatccagccggagctcccaccggagttctgcagcttttacccagaactggagattctcagtctgccggtacggcttttcaatgtctaggtggtaggccgtaatgtcgccaaatttgcgtttcgacttcttgatcgcaaggttgtgtaactgaaccagggcacggccgtcccggaacctatcaagaaacgcagtgggaagggagtcggcgggagtctcctcaaccggtgtccaggtcggtaaggagtcaccgccaggcaagaggctgcgcaggaaggactcctcgcgtgagcgctcccggcccgtccaatcgccagcagcccaatcccaattctgccgctcttgagcttcaaggtcttccagcttcttttcctggattagcatgacgcgcacagccgcgatccacccctgaatcttctcacgttcctcctcgcgcagaccgctggcaaaatgccgggcagaaaaccgcttcaaaacttccaggacgtccaaaagttccttgcggatgtcccgttcgctctttattgatgccaagcgctctgggtactcgtgggtggtatagtagattttggctgcgcggatggcatttgtaacatcgtcgaggatgcacataccctgcaactcctctttattcatcgggggcgcggcctgcccggattgatcgtcctcgtttgggacatcgtccggagaaagactcgatctgaggattgggcggggaggaggctccatgccattttggattgcctcgatattagactctgccttatccagcgcgagcgtaagctgccggcgcaagaaaagcagacctggaggaggagggatgtggtgcgttttgatgctgtacgtgctgactgtaggcggcagcatcacctcggcgtcctcgtcctcaaattcaaattccccctccgtcaggtctgccatacctgacgggctcgcgaccagatcatcatccatgtgtcgttgattcggggtgatcaggactcgtggcacattatttctgttcttcttgttcttttcccactcgcgactccttccgctcttcccgtccagtaagcccgtcctggcaaaatagtattgtaagtgggcgatactgccgaggctcatgacgctgtcgcggtggcgtgccgattccgagaacttggcacccaatgcacgggtatatccatggcgccgggatgatgttgatacagacgatctggcatctgcggaggtagcggaggaggtcgagcgggaggactcggaggaaaacgtgcggtctggggaggaatatgaggagatagctggcgttgccggaatagatggtgacggcgaggagtcgcgtatagacgctgccggtttagagtccatggaccgtcggggcgcatccatcttgattgaatttgaattgtcaccgggtcagaaggaatggatctgtcgcgtggagaccaatcactagaacgttcacagtgacggggtattctgcgggggtgacgatgtgacgttaacaatgagggctggacgatccctagacgagcaacggcttttatataaatctattaatgaaaggaccaaggtttaatgagacctgtaggatcgacggacgaaaaactgcttttgggccaaaagggggggcttcgactaaccggggctaaaaggggaagcgggtcaactgccatggagttgaaagagatgagtgttcctattttccaccgaaatgaaccaatgaggcccgtgacacccctttttgattatcgatcggaagttatgaagctatacggagcacggagtatagtaacatgatgctgtatacttccagggcctcgaacatccacgtgttcctgaattgcctggtaaggtttagcttgtgccccgcatcccatggttcgatgactggaaccttccaaggttcgaacattaaaacttccacgtggcgttacatgtctacattgtatactccgtacaacttcaagcccaatggaaaagagatgtatatgccattctatgataaataaccctttctaatcctctatatttgaaacgcctgtcaaaatgtgcgtttggaatgccttaatgcttcacagctctcggttcaacaaagatctccttgcggtcccaagcagctggcttgaggtcatgaatgtccttcgcacctctcggttcaggaccaaagatctccttgcgatcccaaccagctggcctgaggttatcaatgtccttcgtcgggtggattttgttcggatcggtgtactcaatctggtagggattgggatcgtaagtctgattgaggttggcgagggtgtgattaacctcgcggtgcttggcttcgtcggcgcggacaaacaacagcaggtccttcattttgcggtgaccctctggcatctgccagtatttaaccgagagatcgggtgcctcgagtttctcccacccgggaagcttgccgctctctagttcctcaagagcacgagtataagtaatgacagcctcctcctcaaggtatcccacaaatctgtggcaaatacggggggagatcacgtatgccaggaagaatccgttgaagaagacaccctgggctgcgataaccataaagcgcatgaaccagcctggtttgtccagttttaggaaggtaaggaggtgcatgcgttcattgtatgcttcttcaagtagggtttcaatcctagaacgaaggaagtgggttagtattgaggtgatatcgttttgaatcttgacttgggtagacataccatccattgtccctcttcatcttgcgaagactactgagatgacgcagcatgccgcccaccatgccggggacaccggccacactttccaagaaaataaaccgagttaaccatttttgctcggtcattctgaagaatttcggcaggttctcgccgggcttaggatgtctgtatcctgtcgctgtgtccataccccatcggaagacacgaactgttccaagggcaacccagtcggaccagtttgaagcttgtctgtgggctatgcgaatattttccatttgttcctcggagtatctggcatagagttagtgtctggctcagagagaggggctgccgatatacttacactggatgcacccaggctgtttgcacctgcttgacattaggagtcttgggtggtgggaagaagtccttgttgtttttctgaggtgttgacgagataggacgcttgggtgtgaggctgaacaccgctgtacgcttgttgattccacgtgcgggcttcaatgtctttgctgcaactcccgagtaggttcgtacaacaaggtggtactgcggcttcgccgcagccctcatgggagccctaactgagagagtattcatgatgtggccaacgagagcgagtttgaagtcaagtcaagattgagggtgataaatgtattgtaaatggtgaagatgattgagacgaagaaaagtgaaagaatataaggaagtttagggaatatacagatgtttaagataaagtctcggttgcacagatcaagtggacaccccctaatcttttaaggctttaaatatataacctaccaatcatcggaaggcgaatataaccagggatttgcaaaaaaagttaaagaaagcccctggaactgcttaggttatacccttgggatgatggcattccgtatagttcattgccgcaacacccagatattcccccattctgccattatcagatcacttattcctctagatcatatccctgttgatatacttcaaacaacaactgaatacatcagccttcccattatctctacgccatattccacgttatgaccaagactactcaaaacggtcatatccttgttctcgggagggaccggcccgggtgaacaccgatatatgactcagcccgccaggcgaaggcgatcccgagaaatagccggcgacaaagcccggagttattttgaggtcgttttctggttccgggatcctgaaaatatccattccctctatcttaccggcgactgcatgatcgattggctggtagccttgagaaaaggcgaatatccctgcccgtttcctgccgatcaaagcactggcacggagtctcggcatgaaagatctataataatagatcgatgcatatataaagagcctgtcaaatgtcttcatctgcaagtcaaggtccgcttaccttttgtcaaggctgtcattctccttccttatatccatcctctgccgatactccgtaccgagtactctccttcaatatggatatctctgcggagtaccaatgcatagattatgcgtaccggctttacctagtattataacaagctaggtgatatcatcgttcaaagtacatagttagatgagcattacaaataggttaatagctaatggttatgttttcccttttctattattatccaatctgctccctgaatcgctagtcgcctgtctccatattttcaaccttctacatttctttctcacattctgtgactttgcattcttagccttatcccaatgttttgcctgttgtctgccctgtcagtcactgctacactagctaagccattgggttccagctgttatggctagaagtttgtattctagaaacaatagtgccgcgcggtcaaagagaccccgaacactccggctagtattgacttattaatagcaagaatgtagatttcatcatgattaggtagcatcgtagctgtacggtcaataccaaggatgggtttcgaataatgatggagtagaagaatccacctggctctggcctccacttgtgttctgattattgtatcagagcgaaaagaacccaactcctagtcccttgcttcaaacatggaatctgctgtccgcatcacaacaaacccctcctcgtcatcacgcacatctagctcccgcttctccagcttcacaacaagagccctagagggacccttttggatgcgctggaggaatctctgcaccttttcgtcactgctctgggcctcgccctcgacctgataagatctggtaagccgtctatccggagacacgataagcagtacccacccttccgcaagtggtatttctgacccagccgttgagctcatcgagattagcacacttttgggtgaagtctctatagtacgcgataggtagccactggttaatcgagggactatgatgtcgtctgttaagatggacagtatttcctaccggaagccgacacctagggatccatgttagcgtcagaggatacggtggtgtttaaaggtcgacccaccttgaacggtgccgtggactttgaaagcaatctgaaatggatagcatatcagcaggggaaacctatagcttttgctttacttctagaaatatggctgaatgaatatgtagtagaggacatactcgagtttgtggcatgtgtgacattttgggatgaaatatggtatttggaagagttgggtagaagttgaagtgtatgaggtagaggttgatgtcaagcccgagtcttggcccccgcaaacttatcttaaccttaagggccaagccacgtcgatatcatttgtgcaagacgtcgcaatgctttgcattgaaactagatctgtgatatcaactgggagatgaatacttggaggttgtactcgatgtgatattggctggtgctgattggttccgcaaaaggatctacaacattacaatagacagtacactgaacatttcctcagttatttcgatatgcaagggaaatctattttattttgattttagactgggattttactccgtgtcgagataggatatagatgaggccacctacgtggcggtgcttcgggcccctgagtaaacactggaatctcaatgttccgagttcaacttctccaaacctgcgccggccatgccactgatataaaatgccctccattttcgcctggcttcggcgggtctattcgctagatacccttgacactcgtttcacctcctccgcaatccctgccaacaccaacacacgaccttccaccaaggatacccgcaatgcaatagcccagggcgcgtcaccttcactttggcgcacaccagaattctttgtctactacttgttctttatcactcttgttccattgatgttcaagaccgtcatcgatgtctcgaaaggtgagtgtaggccggagaaaatgctgggcctacaaattctgacagcggatcaacgtcacagaaagccacccagcctactccacatactctcaccttttatcacccggttggatccctggccgtcaggtggtaagtatgcaacactcggcgttcagctattcatatctatgaggccagtcccgactgacattattgctctggccttaggacaactccgatgtgcaatatgaaagctttcgcgacaacattcctgtacttctactactcctaatcgctcatcctttggctcgccgcgtttatcagttacacatcaaccgctcgaatgttggaacaaaacaatcgagctattccgtggtcagtgcgggcgaggcgcaacttgaacagcgaatgcgcttcgacttttggttcggactgttcttcatagtagggcttcatggagtatctgctttcaaagtattgttgattctgtatatgaacttccgaattggcaaggatgttccgcgtgcctacgtgcctaccgtcacatgggtcttcaacctcggcatcttgtttgccaacgaactaagcggtggctactcccttgagcggatagcaaaggtgttctctctggggtctgggacgtcagaagatggagccaccgcgctagtccaatgggctcaaactctcgatcatctagggggcttgatgccgcgatgggaggtacttttcaaggtcacagtgttgcgcctcatcagtttcaacatggataattactggagtgtagactaccctgcaggaagtctaattgaagtaggtcttccgaagccatcaaccccatgtgacaatcaaactgaccgaattcaacaagaagaagcaactagaccctgcgaccctctctgaccgtgaccgggttaagatccctgcagaaccagctgcttttacattccgcaactacattgcctatgtgctctactcacctttgtatctggcgggtccgatcttgacattcaatgactacgtatctcaacaacgatatacatcggcgtcgctcacacgaactcgcatcgtgatgtacgccgtccgctttggcctcaccgtgctctgcatggagctcatcctccactatatctatgcagtagcaatctccaaagctaacccagactggtctgtcttcaccccggggcaactgagtatgcttgccttcttcaacctgcacataatctggctgaaactcctcatcccatggcgattcttccgtctttgggctcttgtagacgggattgacccaccagaaaacatggttcgctgcatgtccaacaactactccgccttggccttttggcgtggctggcaccgctcctacaaccgctggatcgtccgctacatctacatcccactgggcggcggcggtgatggccggcggtcacccggggcgcccaaaccggcttcatctcgacagtccaacttcatgggcaagttcctacaaattcgcaacttcctgctggtctttaccttcgtcgccttatggcacgatatcaacctccgcttgctcatgtggggctggctcgttactctcttcgttctaccagaagttttaggcggcatgtttttcccggcctaccgctggcgctctcatcccactgcgtaccgtgtcatctgtggcattggctccgttgggaacgtccttatgatgatgatagcaaacctggtcggctttgcattgggtctggatggactaaaggatctgcttgccagcctaacaggctcatactctggcttggcgtatatgatttcctgctgcgtcgtacttttcgtcggcgtgcaggttatgtttgaggttcgcgaaggcgagcttcgcgcgggcatcaacctgaaatgctgagcttttaaacagcgtttttaaacatattttagaaattgtttgtggctagaacctggctataatgagatgaatatatatcaagtcttgacttgtatgtcacattaagattcatattgactattgtacagtttttggtatcaattcataaagtcatcagtaggacagggctaggccaagctccttcccaatactagtagggtttcgtatagtaagtacaagtacaccccctaaaagaaagctccacacctcgaatcctcatggaccttgtagcaatccagactacaagttctcaaatgacaacttttgcaccggatcttcccccaatacccacacatacaacaaaaatgccgcccgggccgccccgacgctggcggcttcgctcgcgacgcactataagaaagcggcggctccgccagtagccgttgcatcagccgatcaggaggcacagggggtgcatacgagcgcagcaggggatcattatcgtattgcgacttgattagtttcggtttccgcggcggtttatcgtcggcatccggctcagcgtcggcggtctcctgcatgggcgccgacacaccggctgttgtgtccgccatggccgccgccggacgcttggcacccgcagtgctagccggcgtcgcgctgcggcgcaaagtagcagcagctttgcctcccttggcggcgatgctgttccgtgcctgcgcgacaacgcttgcgcctcctgcgccctgcatgcctcctatccccccgctgcctgaggctattgctgcttcttcgtcgtcgaggtggttccggaaggtcttttgggactgcaggatgcgtcgcacgttcgaggtggtctttgctcgcgtgccgcgggcgccagcttctcgggcttgtttcactggtgctgggatggcgacgtcgcgctggttctcgcggtctagttcggcgatgtgacgtgcgatcgcgtttgcttgtcgagaggagatgtcgccgcccttgccggcgtcgcggatgccgcgtttgcggcctagggttggggccatcgcttgtgtcgggtcgaagcccctggttggggcgtaagaccagcctggtgtggccgttgatgtgtctgagacgagttcgacgcggaacattttgggatttggtgtgttgggaggtttggtgatgatgcggaagtggatgatggccgggggaatttgttggagatgaataaatgtttgtcttgtttgcaggggagtttggtatgtactccgcacaggacgaaagatttagttgatcgattgttgggaaaggaaatgctaatattttagaacctgggactaatttcatgcaaaaagaacaaagaaataaagaaaaagctatcccctggccatcgaaaagcgatagtggtcatgtccagggttgacaagcttcatacacagaaataaaacgcacccagcccatcccagtcataataaatacacagatgaaacatactggtcaagtttttatttctttttgtgcagcgtatcaaccctggactccagttctgtaatgtatgtctggagcttcatggtagccttttgaagtgcctataaagagaacaatcagttctgcaaagacaaacatcgaagagaaaatgggggccctctcaaagactcagcagggagctatagacgtaccgcaatatcttcagacaacgtctcattggcgagacggtactctgttaggatgtaatagtacaccaacgcgccggcggcgacagatccagtcaggaacccgaacacactagtggatattagcaaaaatatcttggacgctgtgaccaattgacgctgaatgtcattgaaaataggagaatttcccataccctcctcggaaagctccaacaggcttgcttgccggtagcgcggtggactcccagcgggcaccggacgacgagaaggaccggatgccgacgcgtccgcgcaaagggagaaagatctttgtgccaataggcatattggcaatattattttaaccgtagaggggagatttatggattgttcggtggaagatggtggcaagtggagtttgttagaagtgacgttgatgaattgcggaggtccgggcggctcggaacttgcctaagggggtttgtatacaaacagggagactacagtcacacaaaatatatgaaatcattcgaatgcgatatctcgtaggaaagctaaagtacataacgtattgcttcccttaattggccattgtgttctcgttgaagagatccgccaaaagatcatttcggcatactatcaaatctacgctgcccataccgtacgtactctcaaacacataaatactcaatcgagcgaaaaacggtcgcaggaccctctcgacaatatcgtccttggctgtctctcggatccagtctgagatgagccatggccgcttaagaccactgcgagcttggggctcgatgctctccgtggggagagtgggtgagcctgcaccgcgtggaccaaaagtctgagaaacttcatctgccagagcgatgggctcccagcggtcgggtggatagaccgcatcaatcgtgtcagttacgaaaagccattcaaggagctggaagtcgtctggggcgaggacaagcagtatgtcgagcagcttggacgcttgaagcagtgagtaagggttgtagacctccggctgagagccatggggtactgctgagatggcttcttgcagttcagtgttgatcaggggccagaatggcgccatgggggcggcagaggtcttgagcgcgactgctcgaagaaccataaatatttccgcccgagtggcggaagatggcgacgaggagctggttgccgcaagaagatcttccagcttctgaagcaacgccggcaattcaccgacaaagtaatcatcgctggcagaaagcaggagtagcgcgattcgccggaggttgagctgcgctttgcgatcggcttccaatcgggccgcagaggctcctacgccgaacatgatgcccgctgagcttggtggtggaaggcggacaagaagttcagatagccgttccttgtcagcgagaacccactggcgcagcaggtccatccagctgttcttcaccaaatccaattgcaatccaaagaatcggacatcattgaacgcgtcggatatgtccttcttccacattttcgccgctgctggtacttttgccatttgctgtagaagaatcatgacattacggttgagattgttagggaagagacgtgaccgaatgagagggcccactacattagtcgagacactagtaatggcggtattgacccgatctgaatcacccagggtcgtgataaacgacggcatagagaccgctagaatgctcagcatgtcatcgggtccagtatgagagaccgaggtacggtcataatccaccgaagatgttgccataggcccagtgtcttggttgaggcctagaggcttgctagtaaaaactgcggtaaggagtcgtaggagaacatcctgcgttataattgttagtgattatgataaaatcagtagtggatacacatactccaagttcttttcgcatacggcggtcttcgccaaaagtcgtattctccaatttcacccccaaaatagccgcgaattcaatcaaacgtggaagaatctgccggtgcgggaatggattgctaagaacatcgcgcaagaaagttgtgcagtccgtccaaatctcgtcaaggacatcatcgtccagtgagcgggcataagtaaccaaaaagctagcaagctcggactcagagagattggatgttaacgaagacttccggctaggatccaaggcattaggattagtgcgagtgtaaattgcattgaaaatggccgggatggtgatctttgggcttgatccgtcgagtgtatggaggagattgaagataagtgacgctgtctccgtgtcagacttggtccacatttccaccaatgtctcaagacattcaagtgcctccgcagtaaagaagtgctccaagattcgtcgtgagcggtttctcattcgcaacgaggtatattgaaatgaggccaaagattcaaaatctggtggagagccactgtgatcgcctgcgccccacgcccaaatagagaagcagaggcgaacggcgtcttggaaacagagaagaacagtcaggcggtcgttggcggtatttgggcgaccttgcccgctttccgagttgaataccccagacaccatatttccgaaaaagccctgcggttggtcagggctcttgactgttggaacgttggactcttcctcgatgagacgttcgtgtgcatttgcaatacaggtctcgaggccagtcagaagagcaattgtgacatgctcggaacggtcctgcggccaatcctctgtttgctggaaggacagctgaagtctgccatatgatgctcgaatttccctgcagaaacattccacgagcatcaataggatctggaatatagtacctgagtatagagggagcacctcgcagagcagcactatccacttgtctacaatttctcgggatttaggtgagctaattccctttaaaagacaatccagaagccgctctggcggctgcggtagctgaggtagcgatggtctcctgtctgccttgtcgctggtgaaagacaagatcgaaggacttgtcagacggtcacgagagctagctcgtaggtgttttggccgaggtggcgggggtggtagatatgcttgtgcgaatcgcaccttcagtgcagcaaggagtgtatcgattagtgcaccctgcaccacaatactggacccctcggaggagataagaaggcgctccaccaagaaatcgtcaatgccagactccactaattcctcggctcggggcccaagaagaagttgccgcatgagctggagtgcgtccttatgtagtcgttctccatctagattcaattccgtaggtgctggtgatagtgtgctgacgattcgaagagatgcttcaaatatggcggaatggaggcttttgaagtctgcattttctatccaagaaatcatattagcaacaattgtttcgtgagaagataattacgcaccttcagctttggacgcttcaaggcgcttctcattgcccagcacatgagtaagaagtgcgatccatccgttgtgcgaaagcgcagagatgatatttgaagctgtctgtaacaaataggcacattccttgtagtcatcaggggaaattgagtaggtgtctgtctttttctcgctagtttcatcagattcagaaagctcatcaagatttgagatgaccacatggaaaaccctagtaaactattagttatggatcacgcgttgggatgaaaagccgtcttacttgtggatagatggcaagtcctgcagccatagttgcacgctttgcgaactatcgctcgactcttgggagagaagatcaaggacaataaaaagtgggcgttcaagcatagaacattgataagagaacaaggtccctccaacatcaagcacttgctttggcggctgctcatgtgtgttgtgatgactgtgattccataagacatagaatcgctcagcttgttgctctgacgaaaggtggcgggatgctgcggttgacatattgagcattaaagctgtcagcgacgcctcgacaaggtggtcaatccaagaaattgaatgcaggagccataagcagcgaacggcttctacgtgaaactttggacttaggggagataagtaccaccaaagctggttgacaagaggggtaatcagatcgcaagcatcctcatagctgacatagaagccgggggtctgaatgaaaaacaaacttgtcactgtcgaagcgatggtcgatatgacagagaaggaggcggttgttggcttgtccttccctgaacctagtcgctgagagagcgcttcatacagtttgcgatctcgtagaacgcgggactttggaagcttcttgagcaaagtcacaagaatatcgagtggctcgtgaacagataggccgccatctcggcttcttagcgccgcgatagccagttcgtgagcctctcggataatcatttcgccaagattcttaggagcatatggaagaggtggaagctccaagctatttttactttgttcatagaaactgtggacagttttcaatatatcagtaccacggccctttgtgtcgttgacagcagtcttttcagagcccgcctttctcgagaacgcccgctctgtgagtaaaccagtcaacgatttgagaactttgttcaatgcagcggtcacggcctgtttggcagtgctttccttggatgagatctctctcatcttgacgagcactgacaatgccagcagaggtacatggatctgaaccatgtcctcctcgcggacattgaaattctcaataataaactgcgcgagatccaagtcacgcaacacttggtcgctatcaatgtctacatcagaacaccggtaatcaaccaagcccagaagctcggagaatatcacaccactttcaacgccatcaaaaaaggcgctcgcactgcggaaaacctcttcgaagtggttctcaggggctgtggattcaaatgcctgaacactgcgtacagtgggcaagaaaactgcagggacaatatatccaccaatttcccaacgatccattaacgacagagctatgcgaaagggcttggttctatcggatggaataatcggttcatgtttgatcatatccagtagaccagtgactaagggttgtaagcctacccggctgaagtattgtgattgtgtgagctccttgccatcaacggacgcagatcgagcggtttccattgataatttccgatcatccatcgaagaactatcgtttggggaatctggtcccaagaaccatgcccagagtcggcggttcaggctcatgtcccgccgagtgaccacacccaccgcagcaataaccaatgttcgaagatcagtagccgcaattttgctttgcaaaatcggagaactgagtggaaggtgggtgacaagaagatcaaggaagttacgctggacaaggagctggtcatcagatagacctgatgcaaaacatcgaatcaagaggccaggttccggtagaatgacagagtcggctgcggccagtatctcaggtgggatgttctgcggatcgttcccaccagccgtgcttggccgacggtctgcgatacctagctttgggaggtagcggttcaaataggcaagaacaccaaaccgtcgactagggttcgtgatagatgcgagaaagaggcattgccagaaatactgtccagatgccccggcctcagacgtcctttgtgtttcaagttgtccagcagcatctcgcagtttattcattgtgcgtagtgttggctcaaaatcttcacttgtctcctcttcaaggcctggaagtagggctagaatgattgctttcaaggcgggacggatggcccatggttctagatcaacgatatatccctctaccaaagacagaaacaatgggcggacagtaagagatgcgaaagtcaatgttggcgcaaggccggggagatacaaaggcaggtcgtgcgataagccctcgagctggttgtaaacagatgcatcagtaagcatactgtgagcctttcatgtggccacccatacctttatcaatccaaatatgtacgtgtagacttcgagggtcttttggtgcacgcctgacggcaacgatgggttcaagcactgggcgagtcgcttcgacaccaacactttatgaggaacgatgggctgatcaggcggatggctttggagtgcctaatagttcattatcagcgatgccaaacatcgctactaattcgaggaagctcacctttaacaggcgaccgagaaatgatatatagtcggcccattcttggagagcgttgtcgaagagtgaaagcgctctttcaacactagatgcatatcggcgatagttcttgtcttttttgagggaccctacaagcaccaagtaggatcagacacagtcctctcgtgcagttcctgaggtgggcgcataccttccttgccttgtagacgggagcgtgtcaaggagctctcggagctcgcgggggaattcgacctcggaaaggcattgggatcaagactcatggtgccaatgatggacgtaaaattgttgtgaaatttttgaactaccctccgtcatatttaggacatcgaggatgaccctgtgggaaagggggttggcggttgaatgttgaccagaggccaacgcaggcggccacgttcagttgttttgttccgccttgggatagctccgacttcgccgacgtcaatgcccagcaactatcaaatcggcaaacacaactaatcaagacgtgaaatatttgagctaaacaatgtgcatttaattccctgaagacccgcgacgagcgaccgcgtcaaaaagcgcatgcccgcagcggggatgaatacacagcaagacgcaaagaccgagggccaacagcctatcgagacccccaagcagccgtatctttccaagccctcagtcccagattatgatgagggtaatgagagctcagagggagaacggccacctttacctccgcgaccaaatacgttgagtctattgaacgatgaaacgggctcccggtcagctctacaggcagaggcaacgacggctatctcgcgaaccgatatcgagacacaaccaccggaagctcctggtagcacttactccacactagctgttcgtggtctggcccagggtccaaaagccagggcgagcctcagccagttggcgagcccgcggagcagcgaagctggtgactctgcgagtatcagaagctcagtcccaaatggtgattccggagatgttgaaacgctgtttatggactttgctgctacggagcctggtagtcaaaggggcgctacaggtctacttgacttccctgaattcgcggccgacgatatagacgataatggaattctgagcgaatttgaagcagttggcgaacttaatgaggaaggtgataacgaaggtttgggtcaataataaatcgtctcttgtttcataatgctaacgcatgtcagagctgctcctccaacggtggaaagcgaagcgcaagcactatgtgatcctatccgccgctgggaagccgatttggaccaggcatggtgacagcggcctgatttccggatatgtcggggttattcagaccattatttcgttttatgaggattcaaatgatcatctgcgaggcttttccgctggtgataccaggtttgttgtattgacacggggttctttataccttgttgcaatcagccgtatgatggaaagcgacaatcagcttcggcttcaactggaagcattgtatatgcagatattatctacattaaccctgccttctttaacccacctcttttctatgcggccctctactgatctatcgcggcccttacagggttcggagtcccttctctcatctctggcagacagtttcacgcgaggatctccatcgacgctactatcggctctggagtgtctgaaaatccgcaaacaacaccggcaagccatcaacaatgcacttctgaaaaccaaagctagtactcttctatatggcttgcttgtggccggcggacggctcgtcagtgttatccgacctaagaagcactccttacatccaggcgatctacagctcttattcaacatggtttttgaggccgacggagttaaagccggcggtggagaaagttggattcccgtctgtttgcctggcttcaacagcagcggttatctctacatgtatgtgagctttcttgacattcgggacgatatcgaaactagtgcagagatcaccaaagatgagtctgttgccattgttcttatcagtcccgacaaagaggctttctttgaaatgcaaggaatgcgtgatgctcttgtggaggtgagattacataattccacgcaatcgaatatggtatgcatgtactaatgatgcaatagcaaatggagagaaacggcagtctgaaggagatcaaaacggcaattgataatggccgacccgcaaccactgatatagttcctggaactgtgctacatcatttcttatacaaatcgcgtgcaaacgtacaattcactatgtcatcttatgtccctgaatttgcttcggtgactcgacggcgaaggtgagcaacatcccctctgctgttcacgaatgcttgcaatattaaatcattctgactgtgcctatagattgatgtcgatgtacaacaacttgcacgcgagcattcacgccaagaatacccatgtcaaagtacaccactgtgtttcgcggtcagccacttcgttcggatgggtaacccctgtattcgaattctattgtatcgccgagccgaacactaatcgaaatgcacttgcccaaagcgctagcaagattgctcagtgggtgcagcgtgaggaagagaggctattcatcattggcggtgcggtatgtactttgtctctgtggttattatggcacgagtgacaacactgatcatatgaaacaggttttctgatatcttccctacgtttgcactaagtcataaaacacttttgtggtcgccgggacacgaaaatcaaatcatgcctgaaagagagagggtcacatgagcccaaataataacactggatccgaactccgccagtcaatggacggagttctctgtatatactctctcgtgatttaatatacccaatactacgtccgccaaccttacatatatattgtttatggtagtatcctagtctacttttatatctcaagacctcttcgtagaatttactggtagatattctcggttcatcacgttgcattgctagaaaatccataatacgtagggaaaaaaaaataaaagaccacacatgtggactaatcgattgtgtcctctctcaagttgaagagctgacgcataacctcacccgacctgctgcgcagcgcatcgtgatacatggtgttggttataaactgcttggagttcttgatcttggcagcagtggctgtggccaggtcaaagtgaacatacatgtcgtcgatgtagtttgcagcatagactggcaccttgtttttggccagttgagcctcgtcatataggtccggccattcgtctgttgtagccaggatttcggctgcttctttgagctttgagagttctgagtaagactcgaacatatctttgaagacctggaaggtgggaaatggtgttagatctttctgttcaaacaattctgggttaggttgggttgggctatttaccatctcgccggtgaagtagatctcggacaacgagtcattgatctggaattgcgggttactagcgcgcagcctgtctgcagcccagagcgacggctttctatatttttgttagacacacatatgccaaaagcagacggcaagattttctttacccttggcagtagattgattcatgcagaatggcataaatgatatttttgtccataccgccattactgtcaatcacggaaagagtaggcagagtaaggaatccgaacatctccagatcgtttgagactctgaaaacaatgtctagactcgggttagtatttctactacgacattcacgagacaaagcaaggcttaccgtgtaggctatcaaaaccacctaagtcgtgttagctttattcgactgtctgaatcgagggatttaccgtggaagccgaacatgatgcctagttgctggaagcgagccggagtgagcaacccggatggcaatgcaaccttgtttttggtcaggtattgcatgatattcttaacacgggccacatcctcggggaacttctggtagtaagcttcgttcctctccttgaccttctctattttttgtgtcaatgtcacgaataagccactccgggaaaacagggaagcgcaccataggtcttcgcatagacaggatccggcccgttggtcagggggggaaggccaccagtaaggaaagcttctctcaagccctccgggctggaagttaaatgatatcagcgaggtgttcaagatccaagtatggagatcaatgagtctcaaaacatacaactttgacaagtaagtcactgcacagaagccaccgaaactttgcccaaggatactccaccggcgctggtcagccggatagtcctgtgtcagaacatcacggatagcttcgcaatcacggacaatgctgtctgcacggaagttcttgagatactcggcctgcttgattgcatctccctgacgagcaagggttcccgctgtgagagtcgaactgaggccagtgcctcgttgatccagaaagagcacctagagaatagttgagcatcaatctacaaaaggtagaatttaggagatatgacacacttggtatcccttgctgagcatgaattcgacccaggggtaagactgcggggcaccacatccaaagccagggccaccttgaagatagaccagccaaggaagcttgccctccttggcttctttgccctcttccttagcaggctcaatgggtttgttcaagcgactgatgcttcgtgcaaagagcctcagcgtgtccccagcaggcttgttgtagtccacagggacatcgaagagcagctcagaaacacgaagtttgcctagatagtgtcaaatttatcagtttcaacacccgtgggctaattagtgatgatacaaacctgagacattatggaaacgtcgctcaatcagtttcgcagccatgattgcgatgttgatgcggactgaaaatagagggcgcgttggcgacaagccgctttgcggagaaccgcaccattttttggtctaggccttcctgttcacctgcaatcacccagccgagtgaaggaaaaattgagtgtctttgtttttgtttattcccttgaccaagattgttcatagagagatgtgtaacttattgcatatatggatgagtagacggctttgaaaaaaaaataacattggatgtatgtagctatgcccgaacagatacatgtccgacacggtgttcgatgtcttcaacaaatctttctcagaatatgtgcttgatttggaccatattttagtatgtcctaggatggatacattgtagcaaattgacctgggacataaccattactttgttatgaattctgcaatcggttcgaaagcggaatcattccgcaaaaagaaaccatagaactggccgtctcacgagttcgcacccgagtgtttgttggctgcaagttgccggcctgcctttagcaatagtagagtcgcaggtagctgagcagccgcaaatccaaccataacaatcagctgcgtattgaaactaccagctaaaacgtccttcacctcctcttgtagaagaggaggtaggctttttatcgatctcacattctcaaggaataggtgcagttcgtgcgatgtcataacaccctgcaaacgatgcgttagatgaccatttaatatattagatgcaatggcaagaccaatagcaccaccaagaaagcggaactgaaccacggtaccagtggcaattgctgcaacgaaaggcgatgaactagttagccaatgcatcggtcaccttagtatcaggaagttttcgggagaacacatacctaggtctctgtcctcgacaatatatggtgtcgataacacgaggatgcccatggtcagacccattcctgtcccagcaatgactagatagccaatatctgttgcgtggaagcctcgagtactggcaatggtcgaaagaagcccaataccgacagtatggactgtacagcccacgagcagagtataaataaacgggatgcgtcccctagagctggcgatattgataatagccgcagcaactgcggcgatagcagaatacccaatcaaatagataccggcctccaaaggcgacttgtccaacagaagctgggcttgctgtggaacatatactaggacgacgttgtacggtgcgccgatgacgaacgaagaactaaaagcgtgtcagaagaaattgtacggtaaccgtggatattaattagatggactcacataagtattcccagccatggacgatcaaaaagccaacgcttgggaaatatggggtctctgcccgggatgcccgagatataccattcccaggcaaagaaagcgatccagcacacccccgtgagcacaaggagcgcaattgcatccctcgaagaccatgagaatgccagattggtttcattcaatacggcgactatcaaaaatgagccagccatcatcaaaaacgatcccattatatcaagattagcaaatgagcgatatgaggctcgtgtccggaatgaaggagtgtgctgatcaaggccaaagtgtttgggcatcgcaacgatgatgacagcgatcgcaatagagcacaatggtgcactaataatttagttagcatgcttttcaacacagatgcttagcatccacatacttgacgaaaaaggtccatcgccaggccgaattttccgcaagagcacctccaacgattgggcctatcaaagatgcaaaaacaaggcaaaatgacatgagactgctgtagattggaagcttcgttttaggagctatttcgtagacacataggatcgtcaacgcgtatgtaccagcgcccccgattccttggagagctcggaatattatgctgcctcggtagttagcctctagacagaaaatgagcgcaggactacgctagacatacagttggttaactgtctgagcaaacccacaccccatagaaaatgcgagcagaatgacaagagcagcgattgtagtttgtttcctgccaagtatatcgctgatttttgtccatattgccatagaccctggaagtattatgatatcagtaatgagagagatagagactgtgggagactatctcaagacatatgttcaagaagaaaagaaacatccaaagagtagagaaattattataacatcgcatttgtatcatacctgtgtaggtggctagatatccagtgataatccagcttcttttctcgaagccttccaaatcatctgtgatactcgtgagagccgagcttacaatcgtgacatccaagttggagaggaaaaatccaatcaagagtctatacaccatcagtcttcgttagcaaaacccaatggcacttgactgagcacataccctgtggtggtaagcactagtctccatcctgtcgggtaaacaatttcacttcctggggaaggtgctctctgtgccgaccccttttcttggatgtgccccctagcgcgatctttgctagctttattcgaggtcggctctgcgaacttgatgtggctagacatggttgtcggcctctcagtgatgggtgcgtcaagagtaggtgaagactggagtggcaggcatcgttgcaggcgagaaagttttgaacgtgaccactgtctacgtaggaccaagccccgcgtatcttcaccccaggggcttcatgtggaacgccaggagacgcgcgatgacagaatgtggaatatttacatgcaaagaagggtgatccgcgtcgatcattgaacctagatatgctggattggatgtggcttggcataaatttgcttttctggggcatgcgcgattagatttggaattttgaactgccttttcgactgcttttgatgatattattctccatctttttaactgcgacatggtctggaaagaagggccctcacccgttctattttcctaatctgagacagattctccttgctcagggatagctattcgcccctggaatatgcaaacatgctatacaacatagataaggtcgttcaatgtagtcaagtaaggaggacttgtgcactgccaagctggattcggagagtaacgcgagcttgtagttgacttagcaacaaataggcgaagtccagaaatctctgctccgtaccatcgccccatacttctccccgaggttgacaggataattaggcgcaattagcatccaaggagatgtcaggggcaacatgaacaaagggcctaatgagaaacagggtaaaaccagccttaaagattgcctagacagtagttacttcgtccgtcatagattaaataaatctactcagcgcctgaggcagccaagcaagagtcactatggacatctctaggtacgaagtacatgcctccatctccacatcgcctgtctgctccaaaacttccattgcaagatcactagaagctgttcgaacttcggacttcggacatcgacttcaccttgccccactcatcccgctttccaggcttccaacgttctttcgggacgtgcccaggtgtcttccaatgatatctgtttacatctatctatttcctatgcgagatcagaaggcatcacatattgtttctggaaggtatagccgaacgttatagggagcagatcccgagaccccggcattgtataaattggccagattgttcaatttcccctctccccaacacacctttcggccatgcataaccaattccaacaagacctatggaaggctgcacagggaccctgggactcgggaattctccctagctctgagaacttagcgcgagctagagcttctctccccgcgacacttccgaatacaggatccagtctcgaatttgtccagcggcacattgtcgacgatattgtcccggcattcaatgggggaagcataagtgccaattactatggatttgtgactggtggaactaccccagcagcgctcttcgcggacaacgttgtatctgcttacgaccagaacgtccaggtccatctcccaaatcactcgattgtcaccgatgtggagtataacgcacttggtctccttttagatcttttccaactgaagcgttctgtctggtataatgggactttcactactggggccacggggagcaatatcctcggcctagcatgtgggcgcgaatttattttgcaaaaggcggcgcagagaaaaggctgtcatctccagagtgttggtgaagagggcttgtttgaggtattgaatgcactgggtctttccggggtgcaggttttatccacgctgccacactcctccctcgtgaaggctgctggtgtgctaggcatcggtcgttccaacgtacacaacatctgccgagccgacgacccgctccgctttgatattgataagcttcagaaagaacttgcgagaacagacaaggttagcatcgttgcaatatcttgcggagaggtcaatactggtcgttttgcaacaagcggtgcggatttgagagaaatacgccagttgtgcgacaagtatggagcctggatgcacgccgatggagcatttggaatatttgcccgtgtccttgatgaaagcccagagtttgcaacaatcaagaagggttgcgaaggaatacatctggtcgactcgataaccggtgacggccacaaacttctcaacgtgccctacgactgtggctttttctttactcgacacccgaatgtggcatcgcaagtattccaaaacgcgaatgcagcttacttggctgctggagactccgatggcccttccatcccctcgcctctaaacattgggattgaaaactctcgtcgatttagagcattaccggtgtatgcatcgctattgtcatatggcaagtccgggtatcaagaaatgctggagcgtcagataaggcttgcccggaaaatatatggatggatattcgagcattctggttatacagctttgccagaagcattgtccaagtctgagttgcttgatcggacatttatgactgttttatttcgcgcaaatgatgaggggttgaaccgcgagctaggaagcaagatcaacgagagctcgcggatgttcgtctcgggtactagctgggatgggtcccctgcttgccgcattgcaatctcaaattggcgagttgatgtggagcgagactttgcgctggtgacagatgtgctggcaaaggttgcccagagctaggggaattaagacttagaatctcaacgattggacattcaacgcttaaatctatttttttttatatctctatagagggtatcagcgacgacgaccagctcctcctatattctcagtacggtcagacatgctaacaacctctccaatacccgctgcttcttgctcatcttccagagccatgatctcctctcgactatcccaccacttttcttcggccacagagaacgctgctttgcgcaattccttgattgacttgtcaccggactgttccttctccttgacaatctccatcatgatattctgccattcttcagaagtgcggctgaagaattctcgcaagctttcgaacggccgaggcaatggtcggttgtcattgaaagtttgctcttctggctcctcaacttcaagttgttccatgtccttggtaacagatggcaccgtcacatctgtccgggcaggagagggagcatcaagggacatcgcttcggcgtcagcctcatcgtcttcatcctcatcgtcgtcgtcatcttcgtcatccatttcttcgtcactgtcttcggcttcgttcaagaggttccaattctcaggctccctgtagaataactccttgacaccatccagcttgactagatcaatggaatacatatcgtcgaaggtgaactctcggtcacccttttcaaacgtaccaccaaagatgaatagggtatcatcttgcactgctagctgggcattgaatcgccggtggggcatttcgaagcgaacaaccgagggttttgcgggttccacaggctcctcgggtcggggcgggcttgcttccataacgttatcatcttcattgtcccgaattccaactttagcttccagggctttgaggtttgccaaaagctcttcctcatccgctttgcccctatttttagactttgcattttgatttgcctgctgctttttgcccggcgcgcggggacgtcgcagactcaacgggaagaaacggtttctgtcgatagtccaagcaaagagagtatcgaagaactcgctgtcaatgccctcctcggttagttccacgtcgtggacaccaccaaacatgattcctcgacccttgtggtatgccatggtagtgccaacacggggcgggttgggcgtattagcgggcttctttcgtcgttcccatcggacaacaggtgccgttgacgatggagcctcagctgcagggggtgtgattctcaagaaccaagtatcctggtgaaccatgggccggagagccatcttctgggggccgccacccttgccttgcttaccaccacccgcagctgccttcactcgggagtagcccccgtagagaacagctccagtctcgtgcggtagcagagagaatgatgagcgaggatcgggtttttgggaagcaagggtcaatgtggggttgtaccaagtatattgattacaatcataaatccacaggtcctgcaagtacttagtctgctgggaggtatcctggaatccaccaaagaggatgatgtagttctgtctcgggattagctttatccagaagacatatgctgaattaaaacacataccttgaaatatgtcatgcggtgaccacttctagcgggaggacctttgcctttaacctcgagacgggtccattctcttgtagctgtgtctaagtgccaaaaatcattgtagtgataaaatgtgccttgtttcggcgacgagaactctcctgctgatagtaagtctccgcacaaacaatttcaatatacccagcaagacaaccttacctccaaacatatagatgcctccggagtttcctccccggcaccatgcatggccacttcgaggaagagggctgttgggactagtcacttctctccattcgctgcggtcaatcaaatagatgaaaaggttattgaagaaagtggcatgcgtcccgtcaaagtactctccaccgaaaagcaacagctcgtttcggttcgacggagatgctagcacggttgaagacgaacgtgaaaccgggggctcggaaggaacctcagtgacctttaagaatttggcctgttcttcggcgtactgggctagaatggcatctaggtctgcgtcttcagcatcactgtctgcatcctttcccttagctttggacctcttttccttctgcgcggacttctttgattgcttagccgctacacggtccttgtgctcggctgatttcttagtctttttacccattttggctccacgttggattcagaaagtgaattttcgcgatcttcttttcgtggggcagaaatcatgccttttccccacaccgaattaattgcccccctccagatcgatcagatattcgtctgtaggcgtgttgcttccaccattcgattttatttacatgtaactttggcaaatataagaaataggataagaatgattattcccactcgaatttaatttcttagtcctatttgaccgagtaagttgaacgtagttgctgctatagatcgatttgtttgaccgctcacgtgccgacgcgtcgatatcgggttcgcgattgtgcccatcgccccaaacatgaagatcgacggccatgacagcaacaggcccccatgacgaagaataacttagcaactcatctcaaatggttgttaacccaagggaaacctcttaacccccctctggcacaaaccggcctgcccgaacgcaacaaccacgcattaccacaattgattccccccgccgccgaactcgcggccctggatgatatccttgaagacacggaaaatgagacgaatggttcaatggctagattgttaccccaatcggcgagcaagcctcgattgctaagccgacatgacacggtccccaccagtactctgtcaagtacgaagaaacgggattcgccaaaacaatcaaacatagctcgaggtacgtaaacacacgagacgagtcttgcgggaattatcagactgataccgcctgcacggtgattagagtccttccgagaaccaccattatcatcacacaaaccttcccggcaaaagtcgactccatcgcgatcagacagtttccacgcatctggccataaagatattgaatcgattgatttgacaggggagcttgatctgtccacactatcctcggagactatcctggcgggtgagccgcgcgggtcatgtgcacaagaaagtaccccgtgcggaactcgtgagaaacgcggcaagaagcgcaagagtgacgagtatacgtctgatcttctttccccattgaaacatgcgacgaaagtgcgaacgccctcgaaagtgcgaaccccctccaaagccgctctaccccccgcccgtagagacattatatcggaacagcccacagtcccacgtcagacaactcaaacaacccaaacaaatcccccaagcgcggcgaaacgacctgaatatcattcacctactgccccacggagccatcggaaacgagtgatcgcggattcagatgatgacgatgatctctttgatgactgggctgttagtgaagatccggccgataagatgatcctcgatgccggggagaatttgtatccaatacttcccgagatgagtccagcggcggacgagaaaatggtcgagactaagcattcacgattggaatgtacgcccaaagcaccgttcccgactgcgcaactatcgactcagccgaagaaaatggcagttgtcaaagaccctaccccgtcgacgccttggtcgaagccgtccagctcatcacaagaaaaggatccggatctcctgaagtttttggctcttggaagcaatgccttcggctatgcaatttccaaattgaggtctactctgcagaagaattctgagattgtttatcaacaggccatggagggacagccagtcccggaattgatcgctcaaaacaagactcttgtcgctcagatcgaggcaattgaattgctgcaaaagcatcaaaacacgcacaagggcagcgtttctcgcaagcaagacctgaagcagaacttgatacgtgtgatctcacaaggtctagatccaacaaccatgccagaagagcttgcgcagagtcgagcagttgaggcagagttggaacaaaccgaaacaaaaatctgtcagcttctatctcaagtcaatatcctcgaattagcgcacgattgtccacctgaaccctcctatatgaaacccacgcagcccaccttcgaagcccatgcagtcgcacaggagcccgctcttgtctcttcttcgcgtgccgactcaaacacagaattccgtagccaacagcgtttgcctctcacaagtcccagaaagaccaaagacacccgtcagccagatagctatgaggactgtatttctcggaatatgggctctccactgttggattcgatggatattgatgagttcgactggaatgtcagcgacgatgacatattagaagcggcagtgggcttcgatggtgctcaacagatacctgttcgcgagcaagccagtcaaagccgcaaggtttttgcggagacctctggcaacgtccccaaggtgcccgtcccgaagaagtcgcccggtcatagcgccttctggtcaaaccatccatggtctcaagaagtaaggaaagtgttgaaagaccgattccacctccgcggattccgacccaatcaacttgaagccattgatgcgacacttgctggcaaagatacattcattcttatgcctactggaggaggaaagtcgctatgttatcaattaccttctgtggtaactggcggacgcaccactggagtgacgattgtgatatctccattgctgagtctgatggaggatcaagtatcccacctgcgaaaattgaacgtcaaggcctttatgattaacggcgataccgaccaacaggaaaaatcatggatcatgagccagctctcaaatgcaggtggcgaggggttggaggtcctgtacatcactcctgagatgcttagtaaaaaccaagccttgattagagcccttgagaggcttcacggaagaaacagattagcgccgnnnnnnnnnnnnnnnnnnnnnnnnnnnnnnnnnnnnnnnnnnnnnnnnnnnnnnnnnnnnnnnnnnnnnnnnnnnnnnnnnnnnnnnnnnnnnnnnnnnnnnnnnnnnnnnnnnnnnnnnnnnnnnnnnnnnnnnnnnnnnnnnnnnnnnnnnnnnnnnaaaaacagattagcgcgcctcgtcatcgacgaggctcactgcgtcagtcaatggggacacgatttccgacctgactacaaagagctaggagaggttcgagccaggttccctggtgtaccggttatggccttgacggccactgctactgagaatgtcaaagttgatgtgatgcacaatctcaaaatcactgattgtgaagtgttcctacagagtttcaaccgtcctaatctcacctacgaggtacggtcgaaaggaaagaatgatgaggttctagccagtatggcggaaaccattacaagctcataccggaatcagtgcgggattatctactgcctctcgcgaaagacctgcgataaggttgcagaggatctacagaaaaagtaccacctcaaggcaaacgcttatcatgcgggtatgtcagcaaaagcaaaatcggaggctcagaggaactggcagatgggccgagtacatatcattgttgccaccattgcattcggaatgggaattgacaaagccgatgtgcgattcgtcatgcaccacagtatcccaaagagtctcgaggggtattatcaagaaaccggtcgtgctggtcgagacggcaagcgttctggctgttatctttacttcggctacaaagacacagcaaccttaaagcggatgattgatgcaggagatggcagtggtcagcaaaaaggtcgtcagaaacagatgttgcgaaatgtggttcaattttgtgagaaccgcagcgattgcagacgagtccaagtcctcgcctattttgcggaatacttccgccgagaggactgcaataacacctgtgataactgcaagtccggtttagtgtttgagcttcatgattttactgagcaggcatcctgggccatcaagattgtgcgacaattccagaacgcacaggagaaggtgactgtgctctactgctgcgacatacttcgtggggattgcaaacggcctaaagccccagagcatcgcaagatgccggggtatggaaagggatctgatctcgaccgtggagcagccgaacgtctgttctaccggctgctaggtgaagacgcattggccgaagacaacgtgatcaataaaagtgatttcgctgttcagtatatcatcctcgggcgtcgtgcagcagaatatgagagtggccagcggcaaatgaaactacaggttcgcgcgtcaccgaatagtaagaccaaagccaacagcaagccctcagctgctacgcaaaagaaaaagtccaggaattcaggtggcgatcctcagtcaaccatggtatcttctccggtgcaagctgctcaaaaccgccgccttgaccgttatcaatatgccggtgctccagccgtaccttcctcgctcgatgaggatagtgatggctttgaaccgattcgaaccaccggcaagtctcgccgcgcaaacacacgcgagatgggccctccgattaccagcgatcagaagttagatcgacttgatcacatgcatcgtgtagttgtggaggactttcaagagcacgccaaaatcatgcttcaggacgtgagtaatcgctgtactcattagtacatcataaagaaactgactattgttatagcttgtcgttaagaagggccttcggtgccaaccgttctctgaccaggtgctacgtgatatgggcatatcttttcccacaagtaagtacgatcccttgatgggaattggaacaccaggttaacaaggaaatagatctcactgagctttctgcgatccccgacatcgaccaggataaggtgaagcgctacggccggcagatactgggactggttgacaatgcgaagcggcggtacctggagatgacgcaggaagcagagaccagcggcgttgttccggatcccaaccaccataatgtcatcaacctcagcagcagcgatgagtatagtgacgacgatttgttcatggatgaggcttccttcaatctggacaatccagtcttggccgcacccagcaatgcagttgaaaatatcaccagtcgctacttccctccggcagcatctccgggatatgactctggtgacgactgggaatctggcgcggcgcctcctggctccaagggtcgcaagcgccagcctgccagtggcaaacgaccatcacgacggaaatatggctccgctggaagctggaagggcaaagtcgcgcgaccaaaagtcaaatctggcgatcgtcctacaagccagtcatctgcgccgcgaaagaactccagacccaaagctcccaaatctacgattggaatgatgcctatttgatgttcttcttattgttctttcccatcttttgtcgggatgtttatgattggttcggcgtttacacaagcatctctaggtgttcttttctcacggtttgtagggagtcattcgaaggtagtctataggtgccgggttatgtagtatttgaaatgttcacaaaggaccaggatatagaacgatacacatccatgaatcaataataccattttgttactcaatcgtggaatgtccctcattcaattccccagtgagcgaccaaaatcaatcaatcgaagccgccgtgcatctcgagggtgaaactgcgcgaccttggctctcacaaggaatcttgaagacgccgagtcgcgctccaaatcgatataggtgttagcctccaacatagcgtcgagaagaccatgcatctccttcgcaactgcctcccttttgtttgtgggagcctcatccgcgttccgtttcatgaacttatcaatccgccgctgtgatccatcctccgtttctgtcggctctttctgcttcttgggcttgccgtgtgccgtataacctgcctttagcgtagcatctgacacctcaaaagcatcgcctacagtcgggccgcccagatcctcggcagcaagcattggagcaagagtctcatcgatgaacgtatccaacgagaccttgaggtttgcagacgtgcggtccagttctttattttgctctttctgcagggtaagctgctcgcgtgccacctgtgatggagtctgctcttcctttctcgtgtttgcattgcggattctttgaattcgctctcgcagtccgcttgcgattgattgagagtcgcgtagattagcctcttcaacccgcaggcgctcgcggtctacagacagctgttcagcagtcattgtgacagagaccttgttttcttgaacaagacgtgcggtttcttctatggctataagtgatggcagcaccgaatctgttgctgggagctcatcgtcggacttaagaagcgagtcgtaggctttcctggcccgtcgggcttgggaaatacgggcccaggaatcggtacccgtttctgttaaatcaagggaactgagctcccgcagctataactcatgtcaatcgaggcgtcctactataattggaatgacatagcatgccttgttcaattcatcctgctggcgtttgacttgctcttgaagcccttgcaaggttgcatctaaacgtcgcgtgtaaacatgcaatgcagtctcactgagaggttcttttgccgcttcgtgttctgcttcttggcgcctctgtgcgaatttctggatcttctgcacggtttggtcggcgatatccatgcttattttggtggagtgacgcaaaatgcaaatatttccttctagaagtaaaagaaatacttttgatttagagctccattgtccttgagacttgctgtaaaatgtttgattgaagcctaagagacaatcaaaatatcgaacacgagcatcacgcccatgcaacattcgcgtcgacgtcatgtgaccaggtttcagcctcgacttccttcccccatcgttaacttcacctcttctccttaatcaccgggatttgattttcatcgccttgatttcttcccttcattccacctttcatcgccatttcaccacattttcgtcaataaagctatcaactcgtcgatagcgagttttagcccacacccttgacctcagattcagacgttatcggaggctacagtgtggtacagcaggcaacggtttctggcgcttgatatcttgcttgcctcatttcctatttcccatcgcgttcacccaaggatcctatctccaccctttcgcttccttattcatttcgagcatctcggcagatcccgtgaagcttccccagttgtgacagcaaagccctctcacacttgaatctgcacttcttcccgtcttacatcggcactgcctcagtaccacctttccctcacagcctctccaatcttctcaaagcaccaatttccccttccgatcgccagcaccagcaccttccgtgggaaattctggtgtacataaaacgatcataaaagaagaaaacagatttcattcttgacaccttccgatttcacttgtaagtgaaaaacaaacagcagcacagactatccaagatgtcggcttctccatccaaccttcagtcgaccaagcgtcctctcgaggacccttcgtcgccgtccggtcccaatgaccagcctgaggccaagcgcccggcgctagacaaagtagtcaagagcgatgccgaggcggaaacagatgtatccagtagccaggttcctactgtcgtcgaaggtgccaaggatactcagggagatactgtggtccccgatgcgcccactggcaagggtctccctgtcgacacccaacccatccaatcaacagcttcccaggccgatcgcgcgggttctgatcaaccaccccaggacgagtcgagctgggttcatattcgtgcggtgatctccagcccggaagcagccaccgttattggaaagggaggtgagaacgtgtcccagattcgtcgtctgtccggtgccaagtgcactgtcagtgattattctcggggtgcagtggagcgtatcctgacagtcagcggtccccaggatgctgctgccaaggtaggttttttcttccattcaataggtttgttacgactgttcgattgctaatgacaaatattaggcgtttggtttaattatccgtacccttaacaatgaacctctagaggccgcttctactgcacaatccaagacgtaccctctgcgtttgctaattcctcacattctaattggttccatcatcggcaagggtggcagccgcattcgtgagatccaggaggcttctggtgctcgcctgaacgcctcggacgcttgcctccctctgtccaccgaacggtcccttgtcatcctcggtgttgcggatgccgtccacatcgctacctactatgtcgctgtcaccttggtcgagcagctgtctgaacgttacggcggtcccgcggcctcggcatatgccactcgcagcggcggtcctgccggtgctgttcctggtggtatgcaggttgtgccgtacgttccccagcccgccggcggccaatacggccatcccgacacgttcaagcgtcaccaccctcaccctaaccgtgccggtggtggtgcatatggtgttccctacctgcacggtcagccagcccctgctcctgttgctcagaccccaatgcacttccccgccgctccccaggccccttacggcggcgtaggcccccaccagcccgctccctttgttggtggccctcagcagccgacccctggccgtggacctccaacagcccctgcccctgtcggcgctgccattcccggtcagccattgactcagcagatttacatccccaacgacatggttggtgccattattggaaagggtggtgctaaaattaacgagatacgtcacctcagtggtagtgtgatcaagatcaacgagccccaagagagcagcaatgagcgtctggtcactatcaccggtaccgcggagtgcaaccaaatggccttgtacatgctctattcccgacttggttcgtctcccccttccctaggtgaagctgtgcatagctaggttctaacggattgaccagagagtgaaaagcaccggatctaagtcaagcagcgtaacatacaacgcttgctgagagttttattgcgaggttctgcccaaaattctacggtggttaatgaagtctccttttgtttgccttcgctttctctcagggcgttattccttggttctttctttactttctcgttgtatcttattccaaggcgtgtttcatttcctgccattctaattaacaattcccacacaattatccctgaatcaagtagccctttccctttccactacctgctctaatcaccaccgacatattctattatccacgcaacacagctcaaatcatccatgccccagcattaatccatggcaccaagctctccttcgttcctctctcgcttcccctttaccgctcttatttctctccccttcccccgcctaacccgaaatcttttggaaactaacatgtttcgtctccaacccaggaataggcggcaacatcttcttcctcagaggcgccatactgcgggcatagttctctgttttatcggccttgcgatgcgcctccatactgttccagccaacagccaggaggtgcgcgaaagcttgcccactcggactattctcgtgcggcagcttactcggccggtcgacatgccccatcgaccatgatcgtggccccattgactgtggtagctgctcgaccatcgcgatgcggaagctgatcaagtccgcgtcgatctgcttcattcctgacacttcgagatcactcggaaatgacagcgtgcacagctcagtcacggggtttttggttagtgtttctgtggcagagagtggtgggctgaaggtgacgcgcagtgatgacggtggctggggattgtcgggtgccaaaaactcgttgattagttgaatatctattgtgctgcgagggtcggtccagtctgttggtttggttaggctataggccagaggttgtaggtttctaggggtgggtatgtatatcgtagtttgagaattgtttcagggatgctaaactcacctacaacccagacgatggtgtctttgtcttcgaatgtgtatccccaggatgagcgcgcatgaccgctttggtgttgggtcgcctggaagatcctcatcagactcttgccttctatgctggacgggtcttcaggcttgacggaacgtttgacgcggaagaagacgacctggctaacgattggagacatgctgggatggtgtttttcccgacaaatcgtgtagatgggagagacaggcctagagtatcaaaatacagatggctgatgtcacgagcacatgatgtcacttgcatcgaatcccaattaggaaactaccctggtgccttttccttccttcctatcttgtgcagttggtatctaccttggaagtacatatgtaggtgcttctctatggtctcctcttctctcttcctttctcttctcttcccatctctgctcgaatctgctcccctcgacaccatgcagtcatacacactaatttcccggttatccaattcattccaagataaaagcaatcgactgttcttattctctgctttttcaatcgacgtcgtaaaccctagcttcacacttcccttatgaaatggatatgcttctggcaccatgtggtttgcctcatgctggtacatttcacagccctcgcattcttgatcgtgcggcttcttgtcttatcccaaaacgaaccagtggctcatatcatacatatgtattaccattggttgcgggcactggtgaactctcgaatccaaccattatcacatcgctgtcaccttgcctgagcatctcttccgaatcaatctggttcctcggtgaaatcgaactatcgccttggaaactgcttgcttgcctacctgaagtggggggatactccaaattgaatgtggactgctatctcattgtcgcaacatgagttagggtaagaagatgcagaggatgtcttttacgatatccgatatctgatctctgcttctttgacactccagattcttccatgttgcggtgcttgactaatttatccggtatagctatcttggatttgagattccgttgcctttctatcaaatggcagttcatggcttatggtggcggctcaacttcgtcgagttacttgaatcgtagctatggcattcgatccatatgaatctcatgggccagaacttacactacttgtgaaacttgatatttttccctgaacatcttgttcatttttagatgctctattaatctgtcagatgtccccagaagatcacattgactgcaaacttcatgcatctccccttaattccatactctcgatcctggcagaacacgtatcgttttcctcgtcaactaaaagaaaatcacactccggtcaagatgaactaactctacgtgcgatgatttctctgggccaccagagtgctaaagtcttagcctgggctatgactgcatcgttgtggttctcatctctatgaaatccacctactggtagcgatagacataagtatctatagtgatgctgtgcgtaagcggaaatattggcgtcatagctttgaatctgttgagccacagactccatcagctcttcgtcattattggtaagcttcattgctttcggaatttctatagtaacccaaagagctatatcatctttagggtctaccagacactcgaagcccatcatgaaaggacaactatcagtcgcgcgtcctgccattttgctggttggtagatatgatatgtttaaggaaaataagattttttgcaaagctatttagaggaatgctggtggtgaatatagagagagagactcgagggcttcggggttttatatgagttctgcgccgtaggctagaacaaggacttttgtttggtcattagtacaatggccttgattgaaaccccttgaaaccactttcgttccttgatcgcttttcttactgctttcctaactatgtcattgaccgaatttcgttctttgccaggcgttagggatacatctcaagatacaaagccgatgaagtctgacttatatgtcggaaagacgaaagcaagttccaaatgagaatcctacacttaacaataactagccctcggcaggagctaagctgacgcaaataactgcatgtagataatagggtttgaatttgatagttaatttagccactcactgtgacgctgaaaaaagatccgctacatacgtatctgcatgccatgactccctggtccaattaagaccatctaccaaataacaatccacgctgaaagcaaattcccccaaatatgggatcggaatctttagagaaaacccaaataaaagcgaagcagaaaaaaagaccgaatctaccagtcgacgctgcgcacctttgcctgcttgtcctcgaaggccttcttcaagttggcattcaagcgctggcgacgcgacctgttggccttatattggatggcatcttcttgcgggagggcaggctcaccagcaccctccacgctgcggagacggctctgtctcacagagccattgatgctggcccggaagttgagaccgcgtgaaacggaatcgggggtgtgataggcgctaccgtcaatcgagcctcgcgacccaggagtcatgggtatacggccagcggcgttcttgcggggagtagagaatggggagccttcacggcttggaggccctgtggagacaatgtccacgccgagcttgcgcatctgtgcctcgagaacatcgatgtctgtgctctttccctcggccatgctcatcattgtagcaatagtcttggtgacagcctcgacggttggtcggtttctgcctccgccattcgtttgcggaatatcggcgattttggcacgcaggagagagactgcctgttcgagagcggtaatctcgacctggatattcgtgaatgtggtgcgcagatcatgttggagcgcaccttgctcagcggaaagtggtgcttcgagaatagcgccgatgtcagtgtgtgcgtcaagagtcttgcgaatgcttgcgaactggcctcgcaaggtgacaatctgctttgtgagcaggtcacggcatgcatcgagcttttcatccaccccctgcacccgctggttgtccaatgatcgcgaaattgaagcaatcaactcttcaaatctctcaatgtccttgaaggtcatcttggtgtcgagaatgtcagcgggctggtcgccgttcatgacgatcacccactcatcaatatcagagagtttcttgggctgttggtacagaaggaatcctgccattgacctagcatttatacccaaggtatctaccatagagttgatgtcacgatagagccgttctacctgtccggcaatacctggctttggagtgtcgcccatgtagttttggtggggcaagaatgggtccagggtatcaacaggctcaacgggctgagccagttcatcacgaagtctatcgtcctcgtcatcgtctgacaaagataaaacatcatcttcctgaatttgagctgctgcatgtgcacgtgcttgcttctcttgctcctcacgctcctcacgagcaacatcgctggcttttctcaagtggccgctacgctgggcgatatgggtaagagatgccttacgcgaatgcaatgcgcctgtggaccccttacggctgtgtgatttctcggagaatagcacgttcttcttccctccgacccgaactggactcggtgaccgatagggctcacgattacctttcgcgatagagaccgggggagggagcagtgcctgcttagggatctccccgaatagctgctggggaaggcggcctttgtcattcacattgcgagcaggactatcgaagaatcctccggtggagctttgctcggaagctgcatcaaacgagctctgagctgactgcttggatttggcgattaatgcttcgtcatgtgtaatttcttcgccactatcactgaagtctgacccggctgcggcctcagaatctgcatcggagatacccgattcatcagattcatcagggattggaactgcctcttcggaaggtttggtctttggctttgcggtgaagtcaggaggcagaggtgcgtcctcgggaacagccgcagcctcaacctttttggactttgtcaggaagtctggaggaaggggagcgtcgtcgggaacagccgcagcctcaacctttttggactttgttaggaagtctggaggaaggggggcgtcgtcgatcttgggggcaggtttcttctgattgaggaaatcgggtggtagaggggcgtcctcttcaggttttggtgaagccttcttcgccttagtgaaatcgggaggaagcgggacatcctcggcggagcacttcgacacattggaagaagcagaagtatctccagcggcataactagcccggctggtaggatctggtggcaatggtgcctctacatcgagacttgatgtgttaggccaattcttcttgggtgtctctgtcttatcagacagtgctgacaatgggctggtcacgcggttttggtcagcactactgccaaacatcgagaatgccgacttggtgttctcggccgaaggcgttgtctttgaactgaacgttgatgtaggagtctgtgaagcaggtttgcttgccccgccgaaaattgaaaatgtctccttattcacaggctcgatatcttcagtgtcatccattgattcactcggtgatgagcttcccttgcggggcgttgacaccatctcatcaaaggagccaccaaatgagaacgcaccagaagaagatttgtctgcatttggtccatcattggcagccgaaccatcgcccttgaaggcagatttgagctcaaagccaccttgtgcggcgccaaacggattcttgacttcattggatgcttgaggcgggaatgaggtctgggtttgagacttggctccaaagggcgaggcagaagaggcgtttgcgaagggcgacccttttgactgtgtggccgcgaacggtgatccacctggctgtttcgctgcgaatggtgactcccccggctttgctgttgcaaagccactgaagccgcctccaccggagaaggcgctgaagccagcaccgccagatgctacacctttggcaccgaatgggtttgccggggaggtagactgtccagatcctatagccccaaatccagatttcccgaactgtggctgtccaggggtactaggagtgccgaatgatgcgcccggctgagagggggtcccaaaagcgggagcaagggccggggacgatggctttccaaaggccgggctagggcttccaccaagccgggacggactaccaaatgctggagcactttgttttccaaaagcagttgcacccatggttgaagctcccaaggtagatgggctaccaaagacggaagctccagctggcttcccgaaagctggttggccaaatgccgatgaacctccgaacgatgactggccaaatgcaggttgctgtgccggggttggagctacagcctgtggctgagagggagcttgagttgcctgaccagacgagatcaaccccgaatatgggatattttggcgaatggaatcagcgtaaacgaaccaccaagacgaaaggataccatcattatttagaagaagaaccccaggaaggggcgtcgagctctccaagatatcagaacctggaagcggtgcaatgacattttccgtggctgacaagttttgtgccaggccgatgacggatgtctcatctccagagtccttcaacggcacactagcacgtttggtgtcgtcgcttacttctgtggtcatgaactgaccaacatgaagtttggttcgctcatcgttggccagaggctgatcagatcgcgtaatgagcccgagatcagttgacgcagttgacgcgacaatcaagacatctctcaagtgaggcttgtactctctaattctggtgataaattggaatgcaggaccacgtttcagcataaagcccatagtcgagcagacttctggcaatttctggatgaggaacggcgcctgcttgcggcgggttatgatgtagtatgaagaagctgggttcattcccatatcatcctctgaaacatttggtgtgtatgtcacaaagaaaacatcgttctcaagccatgcgattgatgaaactgtataatcgtaagcaaaaacacatatttggttctgacaatcattcgaaacttactgtggcaatctccctccaggtcagatggccgaggaatttcagccttcttcgttccatctggggtcatctggtatccagtgccatcggccaatccagcaacaagttgttttcctttgttgctccatgaagcacagctgacaccatccttgagaaccgggccattgggtccaggaactaggctcccagccttgagatcggcgataagaagctcgccattaacggtgaccagcgcgacaagtgtcgaggaaggctcagggtttggtgccagtgctcgtagcgacacgccattcgtaggaattgaaatcgctggctgcgcatttccttgtgtgagggtgtttgtatcgaaaaccgagattgtggagccattctccgtggcgagaatcaagccgtcgtcgcccggtgtgaatgccacatgagtaggacgagaaggaaggggaattgtggcgataggctggaatggcttcgtcttctccatatcttctccagctggcgcctcgatggactttctgacaacatcagttgtacttattaccagcgcatctgggccagcgccaacaacgaggcctttggtgtgtgcgacagccagaagtgaggaagtaggagcaggaagcgcgttgtcgggccatgccgttggaaggaagcggatatttgcgtccccggagactcctttgaaaccgacttcctatagctatgttagacaggatggcggtgagttataactgcggcgggttggacatacatcggtaaaaacatcgggaagctctgaaccaagctccgcagaggcgcttcccccagcagggttggacgcaccgaagttgaaagccattctgagcttttcggaattgaatgtcgcagaaggagaacgtgtgctttcgcttagaggagagttatgtctgaaagcattaggtgagggtgagttgggaggtgtggagagtgagcgtcgacggagtgatttaggactccgggagagagtctgagagtatgcgcgaaaatcttgagcttgcgtggcttcccgggaattacaagacagacagagagtaaaaatggacgcaacgggtatcgccgacgcgcaaaatgttggaaagagcgaagtcacaagagactacataaagaagcattgaattcgaaaatgatggtccggcaaaaacaccttgtttatgcctgataattgaggctccaatttaggctgcgggagcttcgtcactccagacagctcacttcctcttcaccatctccagcttgctacctcattcgtccatccatccttctcgatctcctctcatattcgaatttcgctctcttttcttcctatacccattctctatcctgataatcagctcagctggtcgcgaacaccagcgttctcacgatgccgggcttcgacttcacaaactacaaccgcaatgcggcgcttcacgccaggggtgttccccttcccaaggccacaagtaccggtacaacaattgtgggctgcatctatgataagggtgttgtggtacggtcccaagagatgcaaggagattcaaaagagctgtgacccaggagctgactcgaatcgccataacagattgcagcagatacccgagctaccagcggccctatagtagcagacaaggcaagatacaccgatgagattatgtacagtatccttttagagggtctaacatcctttgtctctagaactgcgagaagcttcactacatcgcgccgaagatctggtgtgctggagccggtaccgctgccgataccgaattcaccactgcgctcatcagctctaacgtcgaactgcactcgctatccacgggccgcgacccccgtgtgatcacctgtatgacgatgcttaagcagcacctcttccggtaccagggccacatcggagcgtacctggttgttgcaggcgtggacccaaccggcaccggactgtacactgtgcacgcacatggatcgacagacaagctgccgtatgtgacgatgggatccggatcgctggctgcgatgtcggtgtttgagtcgacctggcaaccagacctggaccgacagggcgccatcgacatctgcgccgaggcaatcaaggctggtatcttcaacgatctgggctctggtagcaatgtcgacgtgtgtgtgatcgagaaggaccagccgacccagctgctccgcaactacatgaagcccaacgagcgcccccagaaggagcgcaactaccgcttcccccgcggtaccactgcttatttggaccagaggattatcagcaaggaagatatgaaaaaatatgttacgatcgaaacgctgtcgggtgatgataaccttgctactggggacagcatggaggttgatacttagattttcttggagatgcactgaccagtggtcttcttagattgatttaatgcacgcatgggtttcttatctcactatgttttctgtatgattgtacttcggcaaagaccgcgggcttactgttgtggggtttactacaaggtttcaagcagttacggccggacaggaaatcggagttttcagaaacttgatgtggctttcatgtaaattgtatgctcatctcagcaccctccctctaggcaaggtatgtattatattgaagcaggggtatcgtatcgctctattttagaaaattcccttgtgtagatatccattcgcacaacacatctaccaccagtcaagcctcgattcaccaatctgaggcaaagcagtgagctcttcaacaacctcagagctttcaaacttgcggacaatccaaagaatgtactcatactgagtagccgagatacggcgaccgtcacgtcggtaccggacaacaccagcatgatacatggcccgcacgaactctggatccacgggcccgccgtgtctgcgaagatatccgtaaagccagtgaaccatatggaaagactgggacggagtcaagtgtttgcagcaggagagagcaaccgccagctggtttatgaggtcgaccgctgcatggggatcagggcatcggctgtttcgcgggcctgggtgatatcgcacgaggaccttctcgtcggggtgtgggataggctgccaggccttgtggaggctgatcttaaatggggtgttgttgttgaggagtctgaggatgggccatatgctctttgagtctcctgatcgaacaacactcaagagctcttcaactgtggccgggctggtgagatccatgcagtggaacatttggtcgaatgtgctgtggaaaagaccttgtattcccttatatatggatgggtttgtccacacttctgctagagagagctggcaggtctccagttgctcaagggttttgcgggtggttttggtaatggaatttttgccctttttgttgagggctaggatcagaaggctattgtatgggagatcgaggtcatgaatttcccgcataaagtccggaaagaatattccgctggtaccttggatcaacgtttcgtatagatttagcaatgagcagattggttgatctgttgctcttgaaattttgctgtacatgggcccagtggatcgaccaagcgttcgtagaagccagagtcgcaaaattatctgacgttgggttgaatggctcagaggggcatgcttgatctgtgtttggacacacgggagagggaaatcgaaccagacctgtgactttgcaacagtcgaaatgacttcggcattcgagaggcaatcccgccatctttcaagcaattggtttctggagtccctgtctgctgaagacgatgccaatgactcggttacacgaatcacacagtccgccgcgctgttaacatcaagctggctgaagatcttgtctggaaatggcaagcttgtctccgaatcgacttccatagattccaaccaagcttgaaccaaagcagtaggccactggctgcggctctctgcatcatgggtttcgatgatgagttcctcggcaaaacgaaagctgcgagtacgcaagagcacttcaagccaagcatcaacaatgtttctgtccagatcgtggtatccgaggatgttacagcacccaatggctttccacatcgcccggtagtgcttcaacaaagctttatggtcccacgatcccagagtcttgtttcgctcgacgataatattgggtaaagcagtaataatcagacagatctcatcggttgaaatcaaccccaactctaaagcccgattgatcgcattcaaaacagcagtccgtttgccgcgtttcgtttttgttcgcacaaatatttcgacagctgcagcataatttcccgatccccgggtattcaggaacggatcatccaagaacgcaattgcttctgtaagatctgggtctgaacgagcaagtaaccgctcgaatatctgccggctgtatcgcggctcccggtggaggtcaattctcaaccgacgagtgaaatcccttacatcttcaatgccccaattcttcccatccaagaatgcctccagcatctgctcgcgtgtaacttgatctgcattggcaatgtacgacggagggccatgagtggaatggggtccaggcgctgggttctggtcggagaaagagaaaggtagttcaggaggacccaaagaatgatctgcgaggccttcaaataaagattagcggagactcaaaagactttgcgtgtcttggccacatactctgggtttcgaatggcgctctctgccacggatggtcggtccatttcatgtgctccctcccattgcggccaaacaggcacgcgatatcttcagctggtcctccccctatactcgccagagcggtgttccttcgctttgcaaggcgtctccgtgcttccaatggcccgggaacacagctcccatggcgccgttgaccgttggcgaagcgacgaaacgtggctgcgagtaggtcatcgctgatccagggatgctcaagtgttggagtagctggcggctttagagcatgccggtagacatgtctgccgaaagacatgtggttggctaggacatgtgcaggccgattgctgtcttgggcttgtcgcgagcactcgggatcaactttcgcatggcagctttcgattcttggcgtgatgactaatcacggctcgctccagtcaacgggccaatctttgggcttccattatcacctgcatgtgtatcatattttggtttgtagcatttagtttagctgttattttcttgttttttttattatgggttttatatcatcttatggcccattgatctttcgaagccagattggttagaccacctcagatgtatatcaaatgttcgcttaacttaatctgtaggtatggaaatggatttatatagaagacaaaaagagataaattgcaatcatgaaaacaacgccaatgtaatgcatgcaaaaatttgcccaccaatggtatctcggagaggaacggtgtgataaaccgtaggacagtcataacaagaaagcggagataacatgaactcatgaagcaggtataccttcattgggaaggggcttccgccctgtcaccacataaaagtccatataagcgtggacacttcggtcctgtatactcttcctcacatcaacgaggaagacttcaatttcgggtttcgaccacccaagggcaagaaagggcttatatgaccacccggacaaagcatcaagccaattgttcttactccaagcgccgattttccttagcttctcatcctccggccaggtatttgtcgggattttgaaggtctgttgttcaacgtcgacgaatcctatatccttcatccactgtgcaatccggtgggcgattcgaaattgtcttggtgggtcggaatcacggctcgatcgtatattaaggtctacccaatcatgcatggcgtatgcgctgtatcccccgtcttggttttcgggaggcatggtctcatcgtcgcattttggtttcgggtcgagctcgtgacattccatgtatgcccccggtttgaggtgtttgaatgactgtcgtagtacatgtttgaatgatggcattgccccagtcaagtggccggtatgaatgaaatcaaaataatcttggttccatatccactcttcttcggttgcatcatcaatcaggaaatggacgtttggtggaacctctgttggctgcactggggacagatccgtccctacgatttcggcgtttggaaacaaggccgctgcaagtagacaatttgagatggtgagacaaaacattggggctgggatgggtgatcatacacatctctattggccatattcctgagccagtaccaatatcaaggatcttctttgggtcttggaggggaacttggaatagcttcccgtccatcgccattttgaacatgtgatgttgcatatccaggcgatctatctcctgctcatcattgggatatatataagctaaacattgaattagccatgttgtgcgagacctgacagagccgggactaaacatacctccctcgtggtacctgtgataggttcttccattctcgacaggataatcgattacactgtcagtcaatgactgcgtatccctgttgtgatatggtcagtcacgccagccttttggtaaagcaataagagttgagaagacggaggtagtagtaccagtagtcatcatgaggtgcctacatgatttcacgttagcaagaaaatcgatagttaaaattccggagtatcaataacgatagagcattgacacgttccataagagcactaaactcaccggacgtctagcacccatggtcacctcgctctcatccagcgagatcaatagtggtaggtttgaggccgctctgggggatggacagcaggtaagctatgcctcggtgaagtggaatcaataattgatctcgcgatattccaatccacgtcccagtatgaatacgggaagactctcagactgatgcaaatccagacatgattgaaagggaaggaggggaggaaaaggagcccgacagcttgggttaagttataatctggcagggcgggaggacaatcccgacaactataacttataagatcgacatttgaaatattcgaaaagcaaaagcaaagcccggcgagtggagcagttcgtgtacaaagctgggtaaatggtaaaaagagggtaaagtatatgaaagagatgcccaagcgctttacgcgtgaaatcatccaaagcggaaattgtacccatgtaatgtccttgttttcgatggggaaaaaggtttagttttctaggggaaatgattggacgagatgaacgagagcgaaattattaatctataattattgtttttttttcccttcgtttcaatgttcttttaaattgccaatttcgcttttctcttttgcttttgttctattcagactcccagaatatatacaacctactagcccgtttattttctcctgtacagaatcataacattctatctttttccataccttcactatgttcggagtggggagagttggattgataaaaccctaggattctttttccggtgatccgccggtgatcttccggttccttgacgtggaaccctagatgatacatgttatgtgtccgtcttattcccaaggcattctacccaggacacatactatcgcgattctccagccgatggctcctaggtaagctcgatcgaccaatagaggtcggttccatctagctgggaatatgcaacccgcccagccacgggccgccttcaacctttctgctgggatttgccctttaaatctggtcgatcagcagaatgatttccaaaaaaagttgtgcagaaccctgcagggtcatcctagaatagtcatggaaggccgtaattccccgagggtatgaaatttcttcttcttcatatatcacgttttcgaatcaaaaagaaaagcgaaagcaaaagcgaaattcggcagtgataataatgggttctatactggggaactctcggccccgtagagacgtggagcaattgggattttccctctcaaaatgaattcaaatccgtaaaatcacggtgcccacgccaagacctgtgctgtttgtcatgcatgtactctgtgctcgggtttgactcgaatatcaaagtatcggaataattcccgaagattcacaaattcctgtatgtataatgctcgagtttccttggtgattcttttctccttatgcatgacgactccgactcctaccatattagctctagcggtcggaagagaggagatgatctgtcagaattagcgtggggcgttctaaagcctgggctttctcctacatgcccaaagtggctccaaaatgagagatgaggggcacatagcatcacggaagcataaaagtttccggtactctgggtcttcattttttttcgtttattctctcatgacgtctgaagttccccgcggtacaaagtgtgacctactcgtacatcgtctagacatatgaagtacccaagtccccatcccgaacttttaggcctaggaatctttcattattactctcgtgcacatgtcgatcataaaaaggcgtgattatagcgcatagtatggcttgtagacggaaataacaaatgtgaccaggtatatccccaatttcaagtatgcatatccaaaccgctccaactctgctaaatacccaaaagatccgaatctgtcaaatcatggtgataccctgattcaaagtaattgttgtctttatatattattatttgaaaaaaaaggagggggaaaaaaaacgcgttaacaatgggtcagtagcccaaccttgcagatagaatcccaagcacagcacccctgcagctgtcccaaaaataatatttcgctgccatggagccgggtttccatccgaagggaacccccgggaatttattattggaattgaaattcacccggacccggcgactgggaaagttgttcgggttccaatgcgtcggtagcgccggctccagagccaatttcccaaaatttctagtcggtaactatactctgtacatatatcttctttaatggacttttcaagcgtttttcctccgctagttgcctaagtatgtcaacgcattttttagttaaactatgtctctctcgcacaacggtagatgcacggttcagtgttcgccgaaccacaaatgaactgctaagtcgtcactccacagcggagtcacttgttagtggggacagcccttggcggtttatctcttttgagatccgtgctttagtcgttggcatttgaatacccactatatgagggacttatacggagtatgtaccatggtttccttggtgtggggagatagggcatcggaaattgcaggttcacaaccgaacaactccgaatacatacgagctgaaacacatgttatacaagatgccaacgctctgaaaatcggataatagcctatcggattcgagttcaagactagaaacaatataattgctttagtatgtaccagtacctagctggtagagttgtacaacacatgttggaaacttcagtcggctaatttgcattggactctaagaagagaaagagcaagtgacaggcattttgagaataatgtatgcagcgggaatcaccctgagctgtaccttgctcccgccctcggtagaataccaactatatacttctgatgtagttaaagcctattctatcacgagtatcttgaatcatagccttaggattttcgccaaatgtacttattactactccgtacgtgtcatgcatatagggtagaacagctgcctgctggcgaaagtatagaccgcttgggtattttcacatatatttattccccacaaataacatcacttgattttattggttgcgggtaacctgtctttccgtaagaattatcacttcacgggcgacctttttagcagctagagttgcacttaaaggcgcacgacaatgcagatacgaaactagccaaaagaaatgcaagaaaaataatcatttccttgttatatccttgaacttgataaccgacacccaataaaccacccatcaaccatcaacctgctatgcatgtaggtgcggggtgaattattcacagacatgatcggctagagatccacatagttcagttcacaccgtcggcgaagaaaatcccaacacgttgtcatctttttacagattaatgtggaacaaattttttagacccctccatcgcttagagaaagttaaatatatttggaattggaactacatgttatttgctgatatgaatatgactggccttgggtggaagtcaaacacccaatcggcacggctcagaactgaaaggtatgagcactacaactgtcagacgcaggcgagatgtagatcatgcacgtctactccgtacagttggtctagagaggaaaatcatccatcaacacccaagccgcctaccaatgagaggttagtatccgaatgttgaacctggtattgtcttgttgactttccctttacggcctggtctcattcagaagatttctctatgttgtagcctgtaggtcgtgctccagaagggtctttcttagctctaggataaacgggttatctccactgctgtggttctattggctggaacgtgtccatcttacaggaacggtgcgaatccgcgagggacaaacaaagagcggctgggatacgacgtacgtaatatagtgggttgcaatataacgtaatcggtaagcgagtggccactgtaagcgagtggccaccccacccaagaggatannnnnnnnnnnnnnnnnnnnnnnnnnnnnnnnnnnnnnnnnnnnnnnnnnnnnnnnnnnnnnnnnnnnnnnnnnnnnnnnnnnnnnnnnnnnnnnnnnnnnnnnnnnnnnnnnnnnnnnnnnnnnnnnnnnnnnnnnnnnnnnnnnnnnnnnnnnnnnnnnnnnnnnnnnnnnnnnnnnnnnnnnnnnnnnnnnnnnnnnnnnnnnnnnnnnnnnnnnnnnnnnnnnnnnnnnnnnnnnnnnnnnnnnnnnnnnnnnnnnnnnnnnnnnnnnnnnnnnnnnnnnnnnnnnnnnnnnnnnnnnnnnnnnnnnnnnnnnnnnnnnnnnnnnnnnnnnnnnnnnnnnnnnnnnnnnnnnnnnnnnnnnnnnnnnnnnnnnnnnnnnnnnnnnnnnnnnnnnnnnnnnnnnnnnnnnnnnnnnnnnnnnnnnnnnnnnnnnnnnnnnnnnnnnnnnnnnnnnnnnnnnnnnnnnnnnnnnnnnnnnnnnnnnnnnnnnnnnnnnnnnnnnnnnnnnnnnnnnnnnnnnnnnnnnnnnnnnnnnnnnnnnnnnnnnnnnnnnnnnnnnnnnnnnnnnnnnnnnnnnnnnnnnnnnnnnnnnnnnnnnnnnnnnnnnnnnnnnnnnnnnnnnnnnnnnnnnnnnnnnnnnnnnnnnnnnnnnnnnnnnnnnnnnnnnnnnnnnnnnnnnnnnnnnnnnnnnnnnnnnnnnnnnnnnnnnnnnnnnnnnnnnnnnnnnnnnnnnnnnnnnnnnnngccaactcagtaatcaattgagaagcttcctgaacagagaggccttcatcggcaggtatctgcctccgggatctagtactttttgcttttgcttctcgttggcagcgcgtaattcgcttacttctttctcaagaaaagcggcagattgcatggtaatctggcaggcttttaaaacctggttaattgccgaactaagcgggctcggagggcttcttgatctcatccgaagcaatgctttaatagacgaagcttgcttttgtaattgaatgtagtttgatggcgtttttgggtcccaatcgctatcccggcttaggggggggggtaggtgttcgaagacaaatattcagctttgaaagtacccgatcgggtgaaaaaggtattaaaccggctgctgagaagctatttttaatcgtctccgatttaaaagcttcaattcgtacagaggggtatgcttcgaggaatttaagtttatcaatatagttgatcccggtccgcattttcatctcaaccaaccggccgtacaaccgttttaccaccgcaaaacaaccgatatcgagaggttgtaaaaggtaagaggaatgcggtggcatacaaattggtataatatcgttttccttacaaatttgatcgaattgaggggttaaatggcttccgtggccatcgagtaccaaaagtcgataccttcctactatacgcaataaagttaatggtataaagagtttctgaagccagcgaagtccaatttcatctgatgtctacccatttggactaacttcaaagcgccagttactaggaaggccttcgaaccatgattcaaggaagaccttgcctttaaaaataatacacggagggaggacccatcccgccgcgtttatacattcaattgcagttacccactcgcgatttctaggttataaaagtgatctccgaccgtagtattcacttcttattatannnnnnnnnnnnnnnnnnnnnnnnnnnnnnnnnnnnnnnnnnnnnnnnnnnnnnnnnnnnnnnnnnnnnnnnnnnnnnnnnnnnnnnnnnnnnnnnnnnnnnnnnnnnnnnnnnnnnnnnnnnnnnnnnnnnnnnnnnnnnnnnnnnnnnnnnnnnnnnnnnnnnnnnnnnnnnnnnnnnnnnnnnnnnnnnnnnnnnnnnnnnnnnnnnnnnnnnnnnnnnnnnnnnnnnnnnnnnnnnnnnnnnnnnnnnnnnnnnnnnnnnnnnnnnnnnnnnnnnnnnnnnnnnnnnnnnnnnnnnnnnnnnnnnnnnctcgtttacagtggccactcgcttaccgattacgttatatcatgaagatcatctacggagtatacaacatatacaatcaatatgtccatttcacctgcttggctctttttggaagacagcatatcatcagaaaactagcatagtcttgttgtcattctattatatcttctacgctagtttggtcgattaggcttcactgtccaactacagaaatatcttccctatatcttaagcacaatactgtcttctgtgggtacgtggctatatttggcccattagctatggcgcttcttttgttttgttttgcctataaaagtcatgtctatcggagttgcggtcaacacgaacaacggggaagatcctcaagtggatatatatagcgttcattccgtcattcactacagaatctaagtgagacttccatagattacgcatgcttagcccagcatctggaagcccagtatctggaacaataaggatatcagcaaataaactttaaactagttatggcaggacgcaaacagcatacttcccaattaggttatattgatatcggcaaggataaactaaataccgacatgacgcatcttgtgatctggagaccccaaatgcagtgcaccaacaacaagcaccaacaacaacatatttctattctgcaaatatcatttcgaagcattagcggtaattttgaattttctcttccttgatcctttgtcccattgactttctgaggaggacggggtacagaaacatcaatttgagtgctgacgcgcgacgcgcgacgcgtaaggcatcggattttaccttctaacaattctgtttgcaatggtacgccaaataccagctcgttcctcaaggagccgggtgacgcccgcccgtcaaccgaagcgtcagagacaggcagacgatcatgctccagatatctatcaagaactgttggaggaggccgaagatagaaatcctggtcaatatgattcggacagaccaatcaaaaggcacaaggccggagataggaaagctatccctgtgggattaggggcttcggaacaaacacaccagggctcagaaaaaaaccaacatagcacccaactagtgcaaactgcttacgattcatcgacatcagaagaatcagacgttgattgggaagacgttgaattacagcaaccgcctcagactttgtggaatgaaaattttgtgcctcaaggcgacgacgaggtgctccagatcaccctagagcaggagcccgagaagcacaaaaaaatgatccaaagaaggaagcccttaactggagccgagagaaaaaccagattggatgtgcacaaatctcatatcctttgccttcttggtcacgtccagttgcgcaacatgtggtgcaacgatgaggaattacaggtgagcgttggctcacatgggatatcgattgggggactaacagcatcataggaattcctaaggaagacactgcctaagaaagtagtggcgcttctgcatccaaatgagaataaaccacattacaacagatctaccacgtttatggacggcctcaaccaggctgcagatgccttcacacgcagatttaaggttactaaaccaggaatgaaacgggcccactgggcggaagatgaatatcaattgaagcagaaattggtatcctctacaagtttttccatcaacaattttccactgacacgaatatgtaggagtcaatcatgtcgaatgctgaagtgtttctatccaaaggagattttcgaacccaagcgaagacaatggaaggctcccgagactttggggctcagctattctgtgccctattgcggtctgtagccgtagaggcgagacttgtttgctcattgcaaccgttgccattttctggcactttgaaagacatgacgccgtctaaaccaaagcatccatatattgtgatatcctcagacgatcatggctcctcagcagatgaacgaaataaggatgaaaaaccacctgcagcttcgaggcctcgacggattggacagcctagattcacaccctcgcgccccccccaaccaaaattccattcaggcatgtcaattccagcgattcctagtctacgtccaactaacacgcataggtccgattgcaacatcgcgagactcgccatttccggtattttgggtggaagctttcaacgaagctgcgcagaaatgggtttcaattgaccccatcgtaacaaaatcccttgctaaaccttcgaagtttgaaccacctgcgagtgattcattgaatttgatgaattatgtggttggtttcgaggacgacgcttccgcaagagatgtcactcgtcgctatgtaaaagcatttaatgcaaagacgcggaaactgcgcgtggaatcgacacggagcggcgaggagtggtggaataaagcgctaaaggcttatgaaaagcccttcttcgaggatcgggatgcggcagagattagtgaactaacatccaaatcagcagctgagcccatgccacgcaatatccaggacttcaaggaccaccctatctatgcgctcgagcgacacgttcgtcgcaatgaagtgatccatcccaaacgcatcattgggcacgtggggttgggaaaaagcgtatcgcggagtgagacatcagaacccgtttatcgtcgagctgacctgcatattgtgcgaagctccgataaatggtatcgccttgggcgggacgttagagttggcgagcagcctctcaagcgtgttgctgtaagtcgaaataaagccgggagcttgagtgacgatgaagatgaaaacgagtctcaagagactacactatacgccgagttccagacggaaatctacgttccaccaccagtagtccaggggagaatcccgaagaacgcatatgggaacctcgatgtctatgtgcctagtatggttccgtctggcggagttcacatcaagcggcgggaggcagttcgagctgctcgaattcttggcattgactatgccgacgcagtcactggatttgactttagaggccgtcgaggcacggctgtattcgggggaattgttattgccgtcgaataccaagaagcgcttgaggaagttttgaggggtctggaagatgagaggcggcatgctgcactggaggcaagaactgcggaggctctgcgattctggcggctctttttggtgaaacttaggatcgcagaaagagtcaaggaatatgctagcgataacgaagaacaacagctcgaaggtatcgaagacgaaatggatgttgaagatgctggtggtggtttctttcctgaaccagaccaaccagccaatagcccgtctttgaaagtcctgggaaagggcaaaatggtacacgaccagaattttcccgaagaatacacggaaccagagatggaaccgtcattgcacgaggaggattatattcttggaggcgggtttctgcccgatgatcatgacccagctccgaacccagtggaaccccccaagcctgcgcctttggccgtaaacccgacatcgattcctgagattattgccaggaaaaaagcattgaagacccctcgctactcactggtggttgtcccaaaccacggcttaaactcgacatccgtatccggagtcctcgcaggatcatctgacaatgttcctatcgcagtggattcatccacaaatggtggctccaaatccgcaagtgtggtcactatctcccggccaccgtcaccagtgcccaattatgattctgatagcgagatcgagaagggttccttgctttctgaggaccctgaagatgaggatgcaattcccgaatggctgatgtctgatgaggactagtttttgatagttagacctgctgtatgctatctatgtacgctgaaaatcaaatattcaaatgaaatattcaaataaaaccaaatcttcagagctgctgtactgcttttggtaacgccttcactaccatttgtgttttgtatagatcacatctcaatcacggttatgtatcattatagcgcaatccaatacaacagcccggccgggctagctcaatcggtagagcgtaagactcttaatcttaaggctgcgggttcgacccccgcgttcggctattcctaaaaccaaacctgagatttctttttttgcttgttgttttgcttttttcatcttccaatttgaggattagacagtccagatttgggataattgcattgttcttttagtacgtgtcctaaactccattgtaaatgcaagggggtggggtctactccgtataatgcacgaaccaagtcgatattagcgacgcgtcgacgcgaaccgccttaggcatctctctcatcttttaccgttaggcccccagtccaatgtttagccttgaaccattgctgttgcgatgaaagaaccaccgcctgaatctagaaacctgccagagactcctcgaaatcagtttcgcactccgagaagccatagtccacaaggtcttccaaccactgccacgaaaaccaagactgcacggaaccgaccaccacagtcatcgacatcggcaagcattcgtaagcgaacatcgctgccacgagttcagtctactctcacgcaaattgactttgtgacacagtccacaccttccaatgatgaccagcttagctacatcgacgaacacaaacgtcgtgacgatacccacgacaaaactgagcggccaaatgtagatgatgagtccgacaaggaatcagactatcttcctgctccaccacttcggtcggcccgtatctcgaaattcagaatgagcgaacgagagcacgattcggatgaacgcccgcagaagcggaggagctctggattcgctagtcgagatacacaccgaagcgatggaccacgaaagagcgaggccccaagggcgagtattcgtcctaggggcggtcgaaaatcactggagaagtcagcagggaagcgggataagaccttaactcagatggactttgtacgacgttacattaccatcaacgatgatgatgacgatgtgaacatgggatatattcagccgacaccgcagaaaaagggcatgaaagatgaaccagccgagcacacgccgaaattgaatcaaccacaaactacgaagcgtccgacctccaccaaacgaaatcgcagagctttggaagaagagctggatctctcgacgggcgaacctatatcccagcaaaacgaagcactgcagtcaaatcctggaagcgaaggtgagggcgagcgggtatctgcagctcccgtgacaccgcggaagcttcgcgcgcgcgagataccttcttcacagacgcctgaaagccctggactcgctattataacctcatctcaatttcgcagcgctactcgctctccttcaaaacgtaacccgccgagccccacggacaattctacgtatcctgtcaaagaagaaactacggaggctcggcgagtggtcggggatttacaagaccttggaggtgaatctttaccacaaccaacaacattcgattctccagggatctataaccatttgattcaccccgatctgacaactaccgaggaatttccttcatctgcacctccaacggagtcgacttcccaggaatttcccaccgaagaaatcggggactcgagaaatgaacccaccaaaagagagaggacagtcatctatgaaacggacgcggactcagaatacggagactctgaggacaaccttaatggatgttccatgacaccatcttcaaagaaagcaaaccgaccaattggtccacaagacggcgtacaggggactgaacacagcgcggagttatccaaggatgattctcaagaacttcctctaccagttgtgcaatcgagccctggacccaatgatcctccatccgaaggtccaatgtctgatgcctcaatttgttatcgaagaatgcacgcagctacacaattcccgcacgagccaatcccaatgctgaatacacagaagatggctgagctgttccctcacggagacaatacccagtacacaaacttggaggcatggaggccttctcttcgcaaacaggcgacggggccactctcgcagacacagagccaggaaggcgacaaagagtctactgaaatggtccccgagtcatcgcctatccgagaacaagaacgtggaatcgattcaggtgataattcgttccaacgacctcgtgttcctggctcagtggtccaagtcgagtcctcacaggcggtggaccgagatcctcaatggcagggccgagtcctctcacggagccagctgctcacatcaagcgtcatggagagcattccactcccgaacttttggatggggagtcaggatagtgtaggggagccttatagcttacctgaaggatgacattgtttccgagaccattattcaatggattatgatttatgaagacttagaatattattcaatatgatcactctaatctttaccctgaagccgctgcccagtgtgtttatacgctgtgcggtgtgcggtgtacgatgtagttttggggatcgtcgcaagcggggcggtcgggtgatggacgaacgcggagacacagcaaccttgtggttccaaagtctttgactctcttttccctcttgcaacttcctaatcatggatatcgcctacgatcacatccaggaagaggcattttcgaacgaagagggagccccctcggagtctaagcctcaggagtccaacgctaatctcaacgatgagctacaagagacattccgcgccttctccgccagtccatggggctcccgaattggaggattatggaacaatgtacgcaaacagggagaaacatactacgagggtgctcgccaggagtacgcagctgccagcgaggaagccgtgaaaggattttcagatctcagggaaacactcgccgaccggacaagggggctgtctctcagcacagctgctttgacgggcagtggcgagggacaaagcgacgagatcaccacccccacagctgctgcaggggaagtagaatctggcgacaagagagaaggcgaaggcgaaggcgctggcgccagtggagaaagctttattactcggttgaaggcggaagccgctcggcgactgaaggagattgagaaggcagaggaagcagccgatgaagcgattctgcgattcggaatgaatatcggccagaagctgcgtgaggctgttagcattgtgccgcccgataccgatgagtccggcaagcttcttttcgagagcaaggatgctgagggaaagcgggtcattcatgctacacggttcgaggcacagctgcacgttatccattcaaacctggaaagcttcagcaaggacccggtcagtgacgagtggccttcgttcaagaaggagttcaatgtcgaaatcaagacggatgagatcgccgccgatctagagaaatacccagagctccgttcggctatggagaagctagtgccggagcaggtggaatatgtggacttctggactcgttactacttcttgcgtctcgtcgtggagaccgaggagaagaagcgcaaggagcttttgaagggtatattgagtccatcattacggtgattgttgttttccagttttaataacttctactttacaggtgccaatgccgaagacgaagaagaggtcggctgggacgacgactctgactctgagtctcagtctccttctactccacatgtccgctccggtgcccagactctcgcccccaccaaagaaacccagaaagccgagcctcgccggtcaaacgaccagcaatctcaagccgacagcgaatccagctacgatgttgtgagtggtgctgccagccgtacacccggtagtcctaaggaaaagagtccctccgctgcgaaggcggatgagagcgacgaagattgggagtaactccctttttcttttcaaggaccatcagcaagatgatccaagttggttccgagggcacctgtttataccatataccccctgagagcgtggtcttgctactgcgtgcgccagcttaaacacggctccctaagtatctgctttggttggagtttaggaatgtcgggtcttttaattttggcgtttcgggcttttcccctccttttattcccagctttgttttctgcaacttgctttcagcgagcgatgttatctgtctatgcggttgatatctgaatacacgtcattccttctatttgaacagtatctcaccccgggatctgactatctatagcccctaggtagatatcaactgacatccaacagccgctatggatgatggcattcgccaaaacaatttccagcagaggattcgttcgcaaggtaggaggaaaatgcaccccctatctcataatcatgatcataatacatgtatgtctaaggcaccatagtccacaaatttcccattcatttcctattcaatctgtcgcgccaggccctagatctctagcattcagaggcctacccatctttttcgaaagaggcgactcagcatacgcaggcctcataccacgctgactactgggacggacattcggtgagcttttgcgcaccggggtttccggtgtgctttccctggagcgtatgtggaagccctgcgattgcctagtaggcgagtaaggatcgccgccatattggtgggggccactatcgggctcccagccgtactggtaatcctcgccgcggtgtttgacggggctttcattgtaggggtcccagccgacgcgacgacgggcctccgagcgcagccgctggcggtgctgttcgtcaccaccagcgccggtagtggatgattcttccaggaagaagttgaggagctcgtcgctgatggataggtgggattgttgctggaattgctggagggatgttaggcgaaggagggtttcgaggagggagagggaggtgcggatgttctcgaagtgagggttggagactgttgttgtggcaggggcggatgagaatgagtgatttaggggagatgcggagtgggatgaatgccccttctcatcaagcgacagcttggccatcatatttgggtcgattgagggtccgtctgcggatggttctagcttttcagcttcggactcggtatcggaggtttcatcttcgttgtagacttcaaatgcgatccattctgggtccagtccaggaggcagacgccattcttcggggatggagtcttcatgcagataatcgaagctgctgatttccggactgtcctctccgttcagctgtgcatcgagttgagcttgttcctcgtccgctggtccctccgattctgcctgaggaaagtcctcctccacctcgtcacgttccatcatgcgccgtggcgggagagcatttaggtcccgtttcaatagcaacaccggattattcgtttcaccctctgtgctgatattgaggatcctcccggtatctgcgtagaatatctttgaaatttgatgaataggaagaatctcccggattcctgccgtggacacgccttcatagttttcgggttgcggatcattctcatcgattgtgtggactcggccatcatctaggtcttcgatgatcaggacttgataagtgtattcatcggccccggctagtcctggaagctttgtccgtgggcgttggcctggagcttgcaatgcagctattggaacgcgacgcagcttcaaacgtgccttgtgcatgacttccttccacgtggcctcgcgtacagattcttcgtcctgaggtcgcaagtggctggcaaatagcatatacatcgataaggtaaaagttggccctacttggactgcctgagatggggacattgaatattgtgtatcccctgctgtgagaaacgtgcttgcttggagaagtcgggatggcgataccgttgcgggcaagttagtggataacttggccccagaggtggtgatcgccagattcatcagtggcactgcgtcttcaatccgagccaacagattcttgatatctttgataataagcttgatttctttctcgctgttcgtctgatctttggacgatcttgctcctttgcgtctcatttcttcagatgccgcagctcttcccagccgctgtccgaggacttgaatgtcccatctcagagactttgtgagggcgacagcagattccaatgaagtatttcctcgagcagcactagacaaattgtgagctttctgacaattcaacccagtgtcgggtgactcacatcaactcaatcatgtcaatagctggggcgataacttgtatcttgctttccaggcgttgttgcaatgatattagctcctctctgtcctcgctcttgacattctggccaagaaaagagaattgatcagcgcctggattctttctacactcaagaagaacgcttaccttgagcaagcgcgacgactgacgcattgcatagctagcagttatcgcaattcccgacctgtgaaggctcttagcattggatggtgtagttcttccgtcattatcaagcataccgaatagcataattcattgcctgccgggtgagctatatgaattgcacgaattagcttctcgctccatcgccagtgacatacgaaacaaaccccagttaaaaaagtgtccattttggttcaagctggaggccaacggcctttgaactttgcagtgtagatcgtattgacaggcatataaaacacccctgagcaacctatgaattaaaccaggtgcttatcgataagagaatgagagctcaaagggaatgagactttccgacaatttgtagttttgaccttgaaagtagacaatggagtgaagtcaaacagttgaaaaggccataagcataagcaaacatgatggtttcgaacaaacaattattcaccttctcacatttaacagaggaaacccattccatataatatcacgtgaaaaagatatcgcggggtcttagtcattcacccgtgcaaaatcaaaaggcactaagacccctcttattgacccaacctgtatttgtccaaatccgtcttggtttggtattttcgtgttaatacgactttagttcttatttcacgatgtcaaaccaaacacctgaatcctgggaggatgagctttcccgacaggctgagggcgttaacctgaacgcacaatctcgccctcaggcccaagcaccctcattccaacccggcgccgcctctttcacgcctggagcctcttccttcgtccccggacagcagtaccaacagtattctggttatccccagcagggatacccccagtatggtcaacaacaggcctatggtggctaccagcagcagcagcaagcctatggccaatacaacgcctatgcccagcagcccggtggcttcagccagtacaacaatggacagcaacagcagcaatacggtggctacaaccagcagcctcgccagaatgcgcctgtagcggcacaacagcaaccccaggctgcagcacccgcccagtccgctcccaagcccgcatcagctgcccttcccaagaccaaggttctgtctatcggcgccacctcctccagcgctgcccccaagaccaaggtcctttcgatcagcactcctaccccgacagccaagcctgctgacaccacccccaaggaggccaatggtgatactaagggccccgcagctgctgaggcaggctcaaaggtggcggccaccaaaagccttgacaagacagacaaggccgctgccactggcacttctactcctacgccatcttccggccgctctagccctggacgttccagcccagcacgcggcgaggcagccaagcaagctcgcgaggtcaacgccgtcgcgaagtcacagcaaactgatgtcgatgaagcaaccctaaaggaaatttacggtgagcggagagagcacgttaacgtcgtcttcatcggtcacgtcgacgctggcaagtctacccttggaggttccctcctgcatgccaccggcatggttgatgagcgtacactggacaaatacaagaaggaggccaaggaagccggtcgagagacctggtacctttcgtgggctcttgatctgacccaagaagaacgttccaagggtaagacagtcgaggttggccgtgccttcttcaaggtcaccatcccgcacccggagggcgacatcgagcgtcaattctccatcttggatgcccctggtcacaagtcctatgttcctcatatgattggtggtgcatctcaagccgatcttggttgcttggttatctctgctcgtaagggtgagtacgagactggattcgagaaaggtggccagacccgcgagcacgcacttcttgcgcgcaacactggagttagcaagttggtgattgctgttaacaaaatggacgaccccaccgtcgaatggagcaaggcccggttcgatgaatgcaccatcaaggttatcaagttcctggaagccctgggctacaagaagtcggacatcttctgcatgcctatctctgctcagcgcactatcggtatcaaagacagaattcccaaagatgtgtgcgattggtacgacggtccatcgctgctcgaattcctgactgcgttcgagctccctgagcgtaaggtcaacgcgccgttcatgatgccgatcagcgccaagtaccgtgacatgggtactatggcagagggtcgcattgagtccggtatcattaagaagagtggtacttatctcatgatgcctaaccgtgaggaggttcaaatctctgctatgtacggtgaaacagaagaagagattccgaccgctaaagttggtgaccagattcgcctgcgtctccgtggtatcgaagaagaagatttcttccctggtttcgtgctctgctcacctaagcgccccgttcactgcgtatctgctttcgaggctaagattcgtatcttggatctgaagagcattctgacagccggtttcaactgcgtcctgcacgtccactccgctgtcgaggaggttactttcgccgctctccttcacaagctcgagcccggcaccggccgcaagagcaagcgtcctcctcagtttgccagcaggggccagaccattattgcccgtctggaggttactagcagcgccggtgcggtttgtgtcgagacgtacgaagaatacaaccaattaggtcgtttcactctgcgtgatcaggtatgtcttctccacacttttttcttaatattgtttcctaacgtatcgtttctagggtcaaaccattgctattggtatgattaccaagctcatcactcccgagaccgaggcccagtaaagtgattttgccactgagggtgcctgaatgtctatattctcaaaagtgcaacgaatcacaaaataaaagcaatgtgcttgtgagaaaatccgaacagggaggtacgggtgggcagaggtcgcgtaatgataccacagacagtccacaactgatgatgatgaacatttcttttttctacatcctttccgcatatagactttgctccatctaatgaatccaagcggttgaaccgtatatgggttcttgggttatccccagtgatattgggagtagcttatgcgagccagatctgatgaacgatcaatcatggtaataaatgcaaatatgtaaacagaaaggatatctatccgacgggtttcctgtcgttaccaaggcaaatcggaaataaaacaaaacgtattcaacaaaagccccagtctacctcctctttccaacaaccttcgtaaacccatcatcgtcaatctcaggctcagcccgctcccttggagcccgcaccaactcaggcgcctcacccatctcagtatcttcttcctcactctcatcgtccgtctcctgatcctcatctgcagtctcaaccctctggaactgactcgcagcagagcgattttggctcttcttgtggaacttctccaacatctgctggatagtgccgaactcgcctcgatccgtctgcgtctttagctccatgatcatgtccgcgacgtccgcagcgctctcgtcgtccaccgccacgtcaaactcgtcgttcatcacttggacgagcacttcctccaggtccacggcgtcggtctcgggtcgatcggccagcatctcggagatagcgccgcaaagccagtcccgcttctcgtttgagttggcaccgccccagtttgactgcacggctagtgaaagggccggccaattgtggagtgtgagagtgatcgcaaggtcgaggtaagaggcagcatctgtggccggttggacggttgaaattgtcgccattttggagggttaagtttatatggttgttggacctaaggtgcgtttgcgattcttttttttttttttgggcacgactgatagcaccccgcggtctcggtggagaaaaagactgacttgctgatggaatgggcaacttaggtttgtgataatgatggaaacagtctctttgtcttcttgggtctcttcgcaatcggtcgcactgtagcgcaattgagttctcttaatactgttatgtatatggaagtttttttttttaaaaaaaaaagaaataatccgattagatattatatagtcatgtgacccgaactcttggcaatattgcctccaaggtttttcgagcttccttccaataacatatgttggagaatattgtgcgattgagttgaaataataaaaaaaggaaaatctccgatagggggaatcgaacccccggctgccgtgtgagagacggcgatgttagccactacaccatatcggatggggactgcgaattactctcttaagtttatttgtgacctcttgggtttagcgctctctgtccgtgtgtgtttccgtgtgtggttcaagtcccttgctcttccccttccatccaacaaccccgattttctttttcgccttcctttctcctacgcctcgcaggtgaggcatttttgccgttggcctggaatcaccgagctcctgagcaccgctatccccttctcccaataggacgtaaaaatgggatagacccacgtcaagatgagattcggggagatatggagtgaaagtctatacattcaagacctgctgccaagtattcaacagaggtgaatttccccatttcgcatcaaatcatacggattctacatattatgagtgaatcaagatgccgaatatatctggtggtgcccactgggttggtggtccgcatatcaatcgatcatttcctaatgcagattagactcggatattagccaatggcaggctacaatgcagccgagagcctctactccgtacgtcgtacttcttgctgggggccgcccccgatgttttggcaccaaaatgtaagagtaaagaaaaaaaggcccgtgtgttcctttagtcgatggtggcgtggtccctggtggtgccgatcaaccgcccctaccctgctaaagtgggtatgcttccaggtcgaaatcttaaaagagttggggccagttgtgaggtatgaaatagaccagactaattccgcttcaatgtataatgtacaatttatcctaacagggccatagcgaggtgtggcaacgcttagttcaaatgtgtctataaatgccactatatgtcaagttcgaatgatgcgaggatagaagaacatagtgtctagtcctgaggggagaaatgtaataaggccaatcacactttcgaccatgcttttcaaaaaagaatggtaggcggtgagtctcaagataaacctgaagtacatcctaggaagagctagtcctaattaggcagtacaactattaaatcaggcatgcgacgttctgcaccttcgtagccattggtccgtgtgcgtgcccgtgcgtggttgtatataatccctccctcgagtgcaatctacgctgctttcgctcgcccagccccgttttacctcagctttcaccatcaacgtcagatgagacatttttgccccttggcttactacgccgaatactgatctgtcgcctctcttatcaatcggtcggtcaattgccgaacttccgcgaaaggttggacgtttgcaatggttgtagaaccgagcagctatatagacaggttacctttcacttttacacctgcttcttctttctcccttcgtcttaggcatcataaatagtatgcacattttaattattatatagatctggcacatcacaggcattactctagaggtcactttcgaaaacgctgtctcggaaagcctaggttacatgtactcttcaatggtctatctaattcatcccttaattcaaagccccgacagctgaagcgctaaatttagtaactttctagtaattcggacgagtttccaaaggaattgattaataaacgcattcacagacagaacagtaagacagaccaaggagaatagactaagaacaaattgagaaaacaaaaaaagatatatctctatgataagcaatgcatatacatacacagagaaaatcttcaaaggcacatcgttacgacttcttggatttagtcaaatagattaagcgaccaccattggcatcttcgattggcagccgggtcacaagaaattgtgacattatcgtcggacagacgcacagtcttggcttaggaagcgaacgtaggtatcgagctcagactagcgacgtagctgtttgggataccgtcttttacaaaagagaggatgtagtcctgtatgataaatgcaatagtctggttcacagcaccagtgtcaactagactataagataaagtcttctgatttggagtatagaaggtgtattagatatcctgtacatggattcccggccatacgtcgaaaaaatgggtaaaggaaccgttattaaaggcgaaattcaacactgccgcattacagtccatgaagatatcgcccaccgtcaatgccgctctctggtagtcattggtataccccttagacccatcaaacacaggcggatagagggacttagtaatatgatcgatagtagagctgttagtataagtgagaatatatttgacgagcgtctcatattcctcatttgtatacaccgttagcaccaaaaccagaccctcatctaagctataggaaatcaaagcctttacagattggtcgtactttccacaacggatcagctccttagggtctgccttcacaagactgccatccggtgtagggccatacatagccgaagtgtacggctgtgagacaccgatttagtttacattcgccgaaactaaaacatcagaaagaagctctcgagcttcagtcagcaacttgacgttcgcctagccgaggtaatcttagaaagtcctttcttggttttcgagcgacctatataggaaataggcataagactgtggcatagcccggttaaagagggctggtgctacccctccgtgtacagtgatatgatacataatagaaccaccgcctgcagattccccaaagacagtgacttatttcttatctcccccaaagcgatagatattgttctagatccactgcaaggcaagtcgctgatcgtaaagtccggcgttgagtacaccaccttccacttcgaatgagggcccagataagaagccaaatgcacctagctggtagttaagagcaacatataccacgccctctaagccaccggcttagctgcgatcaatcaagcccttaggtgatccaaaagacgtcatagacccggcagtaaagcctccgccttagtcaattagcatttctcattaatgaagaatagtaggtgattaccatgaatccaaacaagaacaggtaacaatcttctattcttctggcagttattaaatattttgcgaggcacttggacatccgaaaacagacagtcctcctctccaccggcggagatcgcggacaagtcgctgtaagagacattagggaaattcccagtcttcaaatactcgtttatgtattgtgaggtacgtaactgccaactgcttattccatagggacaggaaatcgactctgggttggactggatgaccgatcggttggttaggggtaacataggagctttccagcgaaggttaccaaccgggggagcggcatatcggatgttagagaagctgtaatgactatcggaatgcttgacttatcattagattttgttgaagcaagcagtttgaaatcgcagcatggtaggatcttatattattcgctccggtcgcctggtagatctcatagcctagatccactataggctgttcctttttggcgcagtcagcgtgaactgcaactagcatacaacccaactataaagtttgtttaactccaaccattgttggtcgcaattacataggttctttagggaaggctctgacccccccggccggtgtatttatatttggactagctggagaatgatggcaagagctaagccgaaaattccctatgtggaactcatgacgaatttatctcgtttaacggtacgaaaaggggcaatttataattgtcagaggccaattcttgaccatgaaggccgaacatgaatacgtgtgtacaagaggatctgcacgaaatcatgcttggcccacttgacccgagaacgaatacacgtatagagatttgccccttaactttcattacatccgccagtggcatacagaattaaaaagcacgtctccagcatttttccaagtaggtaactgtagcagaaagtacctgagtagcagaaacataattcacggactttataccattgctcccatctcgttcaaattgacccttccaggaacatgcgaacatgcgtatacctcgctgggaaacctgactccaaatgtcaccatcactatccacatgagagtcgcgtcgaatacatatgccggccactcattttgtagcaggtatccatcattacccataatgtactctgcaactctgaatatagaccggaccatgatcaacagactgactaggtacagggtattgaggtgccacttccatcgtaaatcttcagaaaagacctcgtgcgttgggtgtctatgaattcggacctgaaacatcaccatgctaacaatgaagaatccgaggaaagcgacctggacaatcagaccaagaatgacaagcttatttccgatgctagcaaggtcactggagatcatcatgccagcggcaccgccctggattaaaaaagacaagacatcgccggtgacaaagagcttggtcaaccagcgaacgggtataagtgaatgtctttcacccttgactgcagtaataattcggcccaaaaccatgtaaatcgaggcagcgaagagggcagggccgagtagtatgaagacattctggatgcaaaagggcatcattcgcccagtcttgtcataagctgacgttcgagcacagtaacctatgaactcaactggtattattagcatgtctcagtctctatgagctaatagtaaatgtccaagtgtacctacagaagcccccaatggcaaagcaaatgcagaaataggtcttcagtttccatattttccaggtgtgatatgcagtcgccgctaggaagagcaagagaaaaataaccgctgctgccctcgaggggacgtaatgccaaagataataacccttgtacgtttgaagttcgggcattgtgtgtgtcaggagcgcgggttggtactgagtgaggaattgcgagctggcgtctttggttgaatgataatataagattgtgattagggttgaaatgttgggaattgaatacttatactctaaggtatgagctcagcagataatatactcgggcaaggatgcgaaaaatgacaaatatccactacagggcattgtctatcgtaactattattagacctgcatcccatgaggagattcctacatactgtctctatatacgcgtatccggtaccagatagagagcaatcttctatggtcattaactaatatacggatacggagtgcagctaacgtacccttactgaagaaagttcgacaacataattgagggacgcgatgttttcctattattgcatattatagtagtaataaagatacctgaagtccgacgtggattggcttataccgtaggttctagtattaaagattctaaactgaaccggaatccttaatcgaggggaagccgtctctagaacctgtggcaacgcgagttgataatggtggctcgtgcatacgcgagtaaaagctttccttgaagatatattccacatatgctccacccattctagtgtgggtcatacatattgccacaacaagctagaactgagagagaaattcgcgtatgcacgggccatcatacgctgccatcatttcagagcccaatcttaataatactctggagtatattcccaatctcaacaaccaaccaattccgtctcgcttttgttgaattcgtgccatcgattctttccgaaatttaaaataccctaggcccctattataagagttaacgatagagacattaggttgttgattcagctaagacttgattcggccagtgcagccattctgcccactccggcccaagataccggtcgatagactggattaagaaactgccaccgtcaccaaaaacccacagatcacgacaggagtgcagaagagctgcataatgcgctagaataacgagtgcttccggcctacggtgcactagcatttcggtatattccaaagaaacaatgattggccaagcgatgacagcattaatattatcgacggccctatcagattgtgcggcattgagtgatgattgtaaagcctcaatcgcttgctcataggtttcactgattgaagggcctagcctggcggctttgataagttcaagaaggcagctgcacgcctgtccgtccctcgtagaattccgcaggcttgcctcagcttcgttcagaatcggcttgagtgccgtctctttgatctgattccaatcttctccaatgactgcgcgtactccgcggtggatacggagatagtggacgaaccgatctagaagcgcttgaaaatcatggtctcgatataccagggtgtcgcatagaatatgaatacccagcatagatgagaatatgaatgcaggtaccgttggcctcatgccgagttccgagtcggtctcatggaacatccgaagtgcatgattctgtaactgcgccgagtggtgtctatacaattcttcctgaggctcgcgaatgatactaaggtgtaaagcagcgagggcaagtagctcattcatcaggtagggagcagatagggcgtggcctatcacttctttatgtaaaaggattaggttgttttcacccttgctcagggaaggcagcgtttctgtagacagatggtagagcagctcagcatgaagcatattgacaggcggatctggctggatagaagaagtagaatctggtggcagcttggtactgggcgattcggctgatactgatggggagattgtcctctttctgctcctcccactggcctgcatgactttgatcgtcatttcgggatattcacataaccgttctgaagatatgcagtttgagcagattggccctttttcatcgcactgtatacagttaggatcttgtctcaacaacaatagaagttctttaccttgatgtggcggcgcttacattcgacgcagccattccgcgacttcttatgcgtcctccgcggcatctgtgcagtggtggtttatcgctaaggaacatagagtatgcctgagagcgggggctatgtatagttgctggctccaataggaagcccactccttaaaaatcggttaagaagctcaaaagaaataagtagaattcaaggaacacaaaatcctgcctcgtagtattgttactgtattatcgtaacttatcacatgatccaccgcaatcggtttaaattcggattttgcccttctgactaatatcctggcaccaacgattagtaagcaagaatgcacgaacaaaagtcacatgagcggtctgtaaaaagacatataattaaagcagtggtatcaaatcttagtccttgacatacacgtatagacgatttgagacccactcactaaggacagcagagttctgcggtttcactgtggatcaccagaccttagtacaatgcctagcgcgagaatctttttttggtcagaacacagggctgtgtgggttggtcctagcgggtttccgtgcatacgcgtatacaagatcacagtcaaacgggattgttgtcactatgggaatgtatgcgcccggaaggcaggcaacttaatttcaagtcatggtatatatatgaattgacattgtcagcccgtcgcgaaaacctcaactcatgttaaattatcgatatgaatatgaagatggcggtcttctcccgcaccttgctctccctgagcgctatttttgttgagatagcgtccgcttccagatgttcgccaagcttgatcgagaagccaaaattgtctggtacttcaatcctcgatgttcaagcccaggaagccctcaacttttctgccgttagccttggaccagggactaacgaaggcggccgatatacaatcagcttctgcaatgttaccgttacccacacacatcctggctggaatgacacaattactactcaagtatggctcccacttgagggatggaatggaaggtttcaaggcttaggtggcggaggctacgctacaggctttggcgaaacttacctaacatacgctgtgtcgcgaggattcgcatctgcctctacgaatggaggcctacctgtggcgaatgggaaagatactatacctacagacctgtcatgggctctgaacagcgaaaacaatgtgaactggttcttcctagaggattacgcatcgaaggcaacgaacgacatggctgtgattggacagcagatcaccaaatcctactacaaaaaacccgcaaactattcatattttgccggatgctctggtggtggaaggcagggcctcttgatggcacagaagtacccggacgtttttgatggcattttagccgtcgctccggcccttgatatacaacgtttcatccctgcaggcttctgggcctcacaagtcatgaaccaacttggagtttatccatcgccctgtgaggtcaatgctttcacggaagcagccgtgaaggcttgcgatcgactagatggggttgaagacggcatcattagctccccagatcactgtcacgtcaaggctgccgactttgttgggatgagctacacttgcgacagcattcggaaaaccttcagtgcttccagcgcggaagttatccaagcggcttggtccggttctcgctctatctcaaagcacgatggctggtacggggtcaacaaggatgcagcgctcggcactgcctatgtgcctaccgcatgctctgcgaaaaacgcatgttactcttttggaagcgacttgtttggcaactggctcaagtatcttgttgctaaggactcgaccttttcaaccagcaatatgactcaggaggagttcttcaaaggcctacgctcttcaaacgttgattattcagggatgctaggaacgaatgaccctgatctctccaacttcaaggcaaaaggtggcaaaatgatcacttggcagggaatggcagacgaagctattccaccgcttgggactattgcctactatgaggaagtgctgaagaacgacccaaaagctcaggacttctatcgcttcttcgaagcacctggtgttggtcactgttacggtggacccgggcctattccgaacggagcaatgtcccaactggttgaatgggtcgagaacggacatgcccctgttgttctgcatgccaccaaaggtagcaacaatacagccagagacctttgcccatatcctcttcggcaaaagtacgttggaggagattctagaaatgcgacctctttcacctgcaccaaataaagttttccttttgaagatttgacctggtcagaccaataatctatagaacttattagcaagcttccagtttgggcccttaaatgaacttttttcttcgtgcctcctacccatcacattactccctccagaagtgaactgaagcaaccctaataaataaatcccaaagctcgggcgattgtagcattagtatacccatatgatagtaacgatacctaccttgaaaaggctatttagcaaaacttttagaataatataatacatcttccacgttttggtaggcaacacaaattttctacttagggtcttccgcagaagcattgtctcgctgcttccaattgaatcggaatctaccaccctaaattagctcgaatttcgccgggtaagctatctgattgaagacttaatcttctcatctaagctgaaacaccatgtgagcagccagtatatatcgcagaatcgctacgtgccaaaagccatgatcctaggtacaaatgcctattgagggttcgtaagacaatttcgatctattttttttggcttgtaggcatcgggccaacattgtggaagaaaagtatgcgccccagacgataacaatgagggtgtagataatgatgacagtccctataggaatagtggtaaatttccatatggcaatagtccctttttggatcgaggtgccccaagacacttttggcgtgtttgttctgaacgagatacgtcctgtctgtcactgtacctttcttccaaattctcaagctcgatggaaggtacagtttcctgagaatcggtatctcgtctactatatcttgcatgttgactcgacgcaaaatcatcggagtcacaaccaacggcagcgatcatatcatgagcaccttgaggctgcctctgagccatcagctttccaccggccagctgcccatgaccccatctcttggctactccccagacattgcaccgaagacgttcgcagttggtggtgctgtattgttgctgccggactatcagatcctcgccctcatctcttttacttcttacatggagcagtccaaagacacttaatttgcccgcaagcactgaactgagtggaaggctgccgtcaattggtttgcggtatatcgtaaagattctactgaactcattgacttttcgcagttcggcaatgcctttctgggtcccaccagttgctcagccgtcaatgccgcctctgtcgacgcattcaaggacacggcctctattgcttcacccgtcggagatgtttcatctgctaagaagtgggctggaattgtgacgtgccaggtcttgcaaagatagaacttgaagagtgcattaattcagaataactaagatagggaggaagaagaagcaagttgcaaagtggaaagcagatagtgaagagggaaatgcacgatgggcagcctggccatgcaggcaagacgaggacgacacaacaacaccaaccatccagggggggtcagctagcaagcatagggatcacatagaccacaccatagcatataatctcctagtacacaaacatctcgcaactcgtttttcattcttggggtgatgatccgtctagactacttgctccccgaaactctacttgacaaccaggctttcgttttctctgcctgaaggacaaggccactaaactaggcatcccgactttccccactgcactagttaactataaattagaaagaatgaatttagaatatcttatactattttatactagattaggttccagaactctactttctgcagaccgacctcgactatacaagcaacggtagtccacagtcccaacagaaagttgtcccaatgaatacgcccgccactttcaagcttcttcgaatcgaaccgaacaatctgcatcacaatagaaacggtccaaactctccccactgcaatagttaatatagctgctacttttcaaacaatgcaaatttcgaatcatctcgctgaactatctagcaaacaatctagctaaagcaagcaagcaaaaagagtatgacgagtggatcgtaacaatcagggggagagggaggggacaaaacctacactctacgcagcaggttcgtgcctgctgaatccgaactatgttatggtaattacctagagtacgtctatagcttccttttctatagagacgagccggtcagccaatcaaagtttatcagccaagtgaagaaagtaaataaggaagtaggtgtttaatttcatcttgcatggctgcctattccagccgatatcactagctttttaccttacgttcatcaattgagctagtaagtttctcttaggtttctcttacttttctcttacttttctcttacttttctattgctctcactttgttctgactcttttgaggaaaaagaaaattcctcccgggacacaattaggctggccacttttcgatggggcgtaatcctgacccttttggtctagcgcccttagtcctgatgtgttcccgtgttcccgtgcgtggttctattaaacccccatttaaccgtaatacaccccatcatcttctgcatcaatcttttcccaggacattctcatctcgtcaagatcgcacatcatcaaccatagatcccatagtagcagcgaacgacatttcatccatcccggaaaggtgtcatattgatcgatttcaggccacgcttcgaggaccttcgcttaaagcactgtcttgtatctttcgttattggtgtcctgctctaaggtttccaccgaagtgcctaacagcgtctgtaggcattccttatcaatgagcatatacattcgatatttattgaatttatcgcgctgaccctatatatcgacccaggccaaagtaagcgcgtattgtatcaagcgaggcaccgtcgaattgcgccgcatcttctataatggttgaactatattgcgcctagattccctagtaaagggcgggatttaccccgggtggcgacttattattccatttgtattccccgaagaatgaccttttgatacaagcttcaagatacttgacgacagtagagaagggggagtcagattgaggggaataggtggtgcgatagataatatatccccaagtccaatgagctttagtttattatatagctcctttgtaggtgcaggtagaggagcgaaagaagcgaaagaagcgaaagaagcgaaacccatcttatgaaagtttgaagaaaggcaaggatgagatgtcccaaaagattcccaaggagaagaagggacaaagagctatcgactttaggcggtcggtctaaccattagtccggaagcccatttccaacacgaccggttacggactgctcctagcttcaagtccaactgccaccttatatctgatctctcttcacctgcgcatctatagctagctcatggtattgctttcagggggccacctggaagatgccataacgtttatacttcaatgttctgatcctcggcatcttaagttattttactaaggtatctagagctttgactccttctatggttctttagataataaatacagcgtttaattgagtgaatggctccatctcaagataataacttcagactttcgggcctccatatagggcagtaaaaagaaaagcaaacaagtaaacacctaggtatactatgcctaagggcgaaggtccagctttataaaaactcaattctatctgtgaaggccggctcgtctgagtcagagttagaggcctcctcctcctcattatcattacctggaggttctttgttcgacgcaatcatggcctgatatatatcctctgctacaatgatcctgctcgtagccttatcagtcccgggagtgctttcgaagtccttaaaggttctttcctgcactaaacagtctggtagcttgtggccggaaatacttctcgacaatgtctttaatatagacttgcagagatattcgccgggtattagccagaataatctgatgttttagtcgagactgccttccttcttgcagtgtatataggtgatgatgaatcggaaatataagaacctcttagctggccgtgcattcccaagaaacttcaattcttttccgtccaggtcctagaaagaggttagctaattgcccaggctcattgaaagaaatattagcttacatcccatgtagtgcatgtcgcgttggcgctgtcttcgtttggaaagcgcttcataactgttgtgtgtcgcattgcttcgtgggctaacacacacttccaacgcgaagatgtcgtgacatcgagctccacaccaagatgtcttgggagtgatagcggaacaacgctggaaagctcactatcacgataatcacgcttgagcttgaataccttcatcacttccttgcgttcttcggaacagttttatgtgatttggcggcactgtcaatctcttccaccttctcgccaaactggtgcttggtgatctttcgatctaagaagtcccttgagacaacgaggagacgggcgtagaaaggtgctttcgccgaactggaaaccgaagtcatcccatagaccgtagcatcccgcttagagctcttcttgcgctcattgtggatagttgctctatgacaggttagctccgtaatatcaacatagcaagttatataaaatactcacccatatagcctaaagcttgggtagccccgagctcaatgtccgacctttttgcttcgacaatcagtacgttgaggcataaagtctcgtcttcctcgtaccagatcccgtagtctagccgggctccgaggtacacccttttacccttaagcctgactgggccaaattggtaggctctttctgtctggacgttcaggaattggccgtatggcaggtccttcgaaacgataccatgtgcttctagcaacaacgcgtcgatgatccgtctaacacctcagtgccagtgttcgagctataccacattagcaatttcactctacctcttcttctgattcttctttcgagctccatacctaaatgcttagggattggcataggcatgacgttctcaagttcattgtcccgtgtgtcaactttgaggttgaaggctttcaagatttctttgcgggtcaatgaggacaacggaacaatcttgtatggtaaattggcctcgctgatatcgtgaacggtctcgcgaagttgacgttcatcaacatttcgatccagaaaggccttggtggcaagaatgagtcggtcgaagagatgtggtttgctggccgacgctttggttgacattttgcgttgcgatggacttcgtctgaaagactggtgagatctgaaaaagtactggaacgctgaaagtaatctgtcggggactgacgactgagaagaaaatgataagatgaaagaaaagaaaagaagaaaagcaggagaagggactatggaaggcagaaaatcaacaaagtttactacctccactacgcaatccacctcatctcgccctgcttccgggacttctcagtctgtaagctaataagttctggctcagtcgggcttttgggccgtttggattgttgtggttgggctccttggtagtgccggctttattatttagaggccagcttctaagggcaatgatcctgagaatatcatgtaagtagtaaaccatgattttcatagaaactatattggcggacctttgcctatatatatattaaggctaatatatcatagaatagccctaaagatattattataagcgagtaggtctacgaagggcagggtattgatacctattcccctccgataaaccctgagactctagagacccctataccctctactatacctaagaagaagaagataaagaagaagaagcggctaactactataagatttacctattttactaccttagcgcgtaatactctctactagataaaagagggctagataaatcagctactagttagaataaagtggtgagagagatatgtagaaggttttattctctacaacgatcgagatctagtcaaatagctaggtgaagcctggcaaaccaggcaacggcatgtgatcggcacgtggccaccacaacaatatctatacgaaaacaatccaagtttataaatcgaaatttcgaccagacaaggtttagtgccgggaagcttaattgtatgatcttgctccttcctcccctcgactcttctctttcttttcctcatcccgccnnnnnnnnnnnnnnnnnnnnnnnnnnnnnnnnnnnnnnnnnnnnnnnnnnnnnnnnnnnnnnnnnnnnnnnnnnnnnnnnnnnnnnnnnnnnnnnnnnnnnnnnnnnnnnnnnnnnnnnnnnnnnnnnnnnnnnnnnnnnnnnnnnnnnnnnnnnnnnnnnnnnnnnnnnnnnnnnnnnnnnnnnnnnnnnnnnnnnnnnnnnnnnnnnnnnnnnnnnnnnnnnnnnnnnnnnnnnnnnnnnnnnnnnnnnnnnnnnnnnnnnnnnnnnnnnnnnnnnnnnnnnnnnnnnnnnnnnnnnnnnnnnnnnnnnnnnnnnnnnnnnnnnnnnnnnnnnnnnnnnnnnnnnnnnnnnnnnnnnnnnnnnnnnnnnnnnnnnnnnnnnnnnnnnnnnnnnnnnnnnnnnnnnnnnnnnnnnnnnnnnnnnnnnnnnnnnnnnnnnnnnnnnnnnnnnnnnnnnnnnnnnnnnnnnnnnnnnnnnnnnnnnnnnnnnnnnnnnnnnnnnnnnnnnnnnnnnnnnnnnnnnnnnnnnnnnnnnnnnnnnnnnnnnnnnnnnnnnnnnnnnnnnnnnnnnnnnnnnnnnnnnnnnnnnnnnnnnnnnnnnnnnnnnnnnnnnnnnnnnnnnnnnnnnnnnnnnnnnnnnnnnnnnnnnnnnnnnnnnnnggggcaacggccacgagggccaaggcaatcgtgggaagggcgcttcccaaaaggtatgcaagctggcaaccatgtaacattgatgctaaatcatggtagaaacgcaaccggggtcgctgcggtgtgtgcggtgtgcgcggccaccgcacccacgaccattggcgatatgcccaaggcagcgccaatgccgggcaaggagccccagtaatcaacatcgctgtaagaagccattctttgacaaacttaaatctagaagactgatactgactgatggacataggggtcggttttcggtggggtcgcgggagtgggctccaccaccaccaatttggcctggggtcgtggccgaggccagaaccgaggggggcggggcggtgggtggagaggaggaagaggaagaggacgaggggcgctgttgccaaggggtattgcaggccaacccgaccgactggaacagctggaggctgcattggcccagcagcaggagaccattgctcgcctccaacaggagaatgccgagctgtcgcgcctgcgactccaagaggggagcgcagagcaggccaatgaggagccgactgatgctctctctatcacagacggccttgatgccgaattcgaaatcaacctggatctcgactccgacggagaggagatgaagtagagtccctctcagtagatgtctcgagaattgaaactttcatcttcggttgcaattgccggttacttttttttcccccaatgatcttcaatgtaagttcgatataatgacaagtcggttattgtacgcggccttcttggtaaatgcacacccgtggggcgaggcattagtacgaagtatcgattgtggatctggaacaagtctaattaaaattaggacaccatttaattcacgtagactgcgtcatcgacctcctgggaactggcggctggcaactgcacgcctttccatcactagacagatcagatgaaaccttcgggagatcaattgcctgatcggaataattattggaggatctcacaaacaacgccgtggatttgcctttggatacgccttcacacctggaagatgatcattctgtcagcttttgagtgcatcgaggaatgcggtctgtttcggggataagcgagcttcggtgctatttgttttcgaattgaagtgcgtagacttgggcaggggtcgtaggaaacgagcggatttgtggtcaatatcagttaggtgaatgaattggttatccctgcatttggtgctgagtatgcctatgcagtatggagaggaattgtcttcatcaagcaagttgactgactggttggttggtcggagagattgaaagtctgaaatctgaaaatgcgaggactgaagcacgaggagagccctcctgccttcctaactagtggtttctcgcttccatctcatctttcccacactttcatctcgctcttcacacttccgaaactaccatcaacagcattcatctacatcatgggtaagcaaatccgcgaacgtgagaccgtcaactcggctctacctcctctactgatgacagatttccatacgagctccaatgccgtacacccacttgtttacaacggcgacttgaatcattggccaaatttctttcagaatgtacgagcaacaatggataaccaacattggagcagcagcgttatcggatacaccctgaagacccacaatcttgatgacaataaggactttgtcggagatgagacaggtgtacagggaaggtttcaacaggcgatcggccaaacacttggacaggcgtttgaagctcaaaggcttgatatccggtttgccgattccaaatgtcttcctaatccagggggaaaagtcccagattgtactatgaagacatcaaggaatgagttgaagcttgtgggtgagctgaaggtgccgtgggttgtccatcaccgtatcgagcgtcgcctaaagttcgagcccttctgccaaaattctcattttcgggtcttagtgggccagattctcggatatatgaaagagacgggggtgtatgtacggctttctgtcgaattatgaagagacgatctttctccgacaacgccacgacggtacgacatgggtcgtggattgctccccagtgattctggcgtccaatatctacaccaaaagatctccggtggtgaccgtgagagaatgctttttctatattgcgatcctggcgcgtgggcaaggcaaggttgataaccaactacctccaaaagctgggtggaatcaataaaatagggcacgagaaaactccgcttcatttatggagctgtgagtaagctcccctctcctaccaatgtagagaggtgtgggtatctctgaagacaaaactccccatgcgagtggatccctttcctttgtcgaatgtgtgatcaagtgtatagaagtcttgacttagcgctccattcagtcttcaatgaaacttgtcaacctactcaaatttcctcgctgctttcaatctgatttactatctggagtagtcgtaaacttagggaatcgtcaattcatccttgtaactccctgagtgtcagggccgccctctgaaccttcgtaggctgaccgttccttctttgggtgttcctattctttctcccttctcaatttagccgccacttgatatatagaccaatggtctggtcgcttctctctatatattaggcgaatacagtatgggattcaaagagtgcatgggccctgctctcgttgggcaatcatctgaccaacctcgattctcaccctacgcattcgacttgcaaccggtgatctctcccctgctggactaattcttcccacaaaactccacgtttgtttcatccgacaaaacatttaattgcaacaaattggcagcgacatgatcgatattctacgcctttttacgcttcgacttcatcaatttgagggttttcatactggcctgagaatttgcgccgattacaccacctaaacacctagcccgtctatctaggaatcttcgccaaagcagtggctcatacgcaaggtaaacccgggacccgggggccatggtagcctctgaaggacaccgcctctctgagatctgccaattttgggtccgctttgcattaagaagggtcgttatttcaagatttttatgacgcaaatgccatggaggcagatggattagcatatttgcttgcttcaacagcgggtgttttaccactatcattgccatcatcgtgatatatgtgatcaactttgacttccattggacttttacagttctcgaggacttgattacgtccagtatgcagtatatcacggagactgacatgcagcgttcaacctcatccatcgaaattgacatcacgctctaaacggcgaatcggtctatcacacaggtagaatatggaggcaaaattaggattcggacctattatgatgggtctggatcagtagatattactctgtcaatgtcagcaataattccttgagaatggcatttttataaaggccatccctgctcataggcttccaggcggtgccggtccgaccatcctaccgattatgaattgatgagacaccgtgtttgatgttttgatgtttgttggcactggagttttacgttttccgaagttgcttggcagttagttcgtataatcatgaatgccgtagaattgtattatagcataacttcttcctattgatatcaatcgaatgattccttagtttcgaaaacgtggcctatggataagctttaggataaacagagtcgagtgtgacttatacatgcagagtccagaaatttcggctacaggcctccacgctattagataagatctggaacatctccattgttatatttgagagcaaaagagcctactggaggaatattaagtgaactttgaataggtggaaacgtaaattcggagatcgttaagaattggattgatcacgaagcaaaatcttggaagacaatagaatattactcgcaccttcaaaacaggggagttactccaagaagaaactcgttatgagagatactcacacctcaaaaaaggcggagagtttaccttcgaggatcactgaagcggtacctggatgttctccctgtcatcaatatcaatagaaacctgcctgtatcaccactcccatttatcaagatcctcacaaatgttcccccagacgtcgcgcggtggtggctcgatcaagttgaaataagccagaatgcgatccccccacttgtcgtcagttggatatgaagcgcgaaacgctgagatccatagatcggcgcattctttgtcccatataatctttgtgatatccccccctcctggaccccagccaaaggacgacatatccctgactttgcgttagcatgatctcaaagacttgactccgcacttactcatatgcagcccggaactttcggcgaacgagatcacgttttggtcgctcgaatgaccagaagagttccggagtgaggacctgcccggggaccttttgccaaacaagataggttatgtatcctccaggtacaggtccgttttccccttgcgtggattggccatatccaagtagtgaaggtacacttttgcatccaccttggctgaacttcttccgagctttggcttcccgcttttcaaagtgaggatttgcctgttgggctcgaacctccggcaggaggaattctgttccctcatcaggaccttgacagtagactctcatgaaggcgtgattattggggaaatgttgatcgtgacatagatacttagcctcccaaccggatggctgttcgtcgggatcagaagtaggctcacgcactccatcgactctattctcataaagcttctcgtcgatcacccatgtactcgcattcagctggagatctgcggagccaggaagggcgatctgagtgcctttgaagatctgagagatatcagtcatcttggagattagatgtagagtgcggaagaaggttgcgaggatgaaaagggaagagatttctgagagcacagaagaggaaaagaaggaaagttcggcattaagtgaagggagatggactttgtggggtcaaatgattatttggtggtcattggcttgcaccatggtacctgaggcaacaccgcactacgaaggggcatagcggcggcagagaaaaaagaatgaccgaattaccattacacactctgtttctcttcactcttttcgttttccttcccacccacccccacaaacttatttcggccagtcggcgagggtcaaagatgatggactggttgctctgcttgcgatggagcaaagtcaacgcttaagaatgtggggatgtggatctttgtgggtcgggaatagcctgagtctattataggaagaggttctctctcactacagcctcatgatgttcgaattaaggaggcaaggtagaattgtattataatgatgatctaccatgtcgattttgaccatagcggggcacttcacagtctcgtcttcttcaatctcatacttgtatcctactccaaacgcttcgagggttcccagctgcagaaggatttttttttttgtaaaataggaagctatgaacgtagttacgacgtagttggtacagattaagcaggcacgatgttgcgtagagggtacatcgtatttcccccagcagcgtaaaattgtattcacaacatcgcagccatggcaagcaatattccgaataccataaacatcgttgatgtgcttcccgcccctagtctacctacctccactacgcaatccacctcatctcgctctgcttccgggacttctcggtctgcaagccaacaagttctgactcagtcgggcttttgggccgtttggattgttgtggttgggctccttggtggcgccggctttattatttagaggccagcttctaagggcaatgatcctgagaatatcacgtaagtggtaaaccatgattttcatagaaactatattggcagacccttgcctatatatgcattgaggctaatatatcatggaatagccctaaagatgttattgtgagcgagtaggtccgcgaagggcagggtgttgatgcccgttcccctccgacaaaccccaagactccagagacccctgcgccctctatcatacccaagaagaagacgaagaagaagaagcggctgaccaccacaagattcaccaacttcactacctcggcgcgtaatactctccaccggataaaagagggctggacaaatcagctgctggctggactgaaaggctcggtatgctaaggagatgccgaggcgacgggcgtccctctgttggtttaccctttttttctctccgagaaccttagcgaggtgagatgaattaaaacggaactttttactaaaatgattcggtgtcgacgaatcgtcgaaattccattgcccaccctgagaatcggcccatacactacgccctccaacgcgatgcgcaacactcgtggcggatgcctcccccctcctattgcacatcgcgatgcctaatcaaggcagagataatcgaactcaaactcacaaggaaggccttggtattttaaggagccctgtctccatggccttctttttacgagaagcttatcgataatcatcgagcccaaaggtggtgccgaggcactggagcatcccggcaagccctgcgcccaagaaatgataacccagagagagtctgcgtcggagatgagcacgggcttcaaggccgcttccagcaggcaattggccaggagtttggagcggtcctggaggcgaaatgggtcgagttctcgttcgccgactttaaatgctcgggttccggatacaaaaaacgcccgatgttgtcgcgttgaattagaattcaaatggactcaatatcaagcttgtcggcgagctgaaagttccttgggtaggcgcatagactaagtgatgcgattaccaacaaccacgctggactcgtcatcaagctggcacagcccctgagagacatgcaggagctgagttgtgagtacggatctcgacatatgacgaaacagtcttcttgaggtaataccggtctcctgcaggggcttgggaggtatggtactccccacccgttcgatcaatcgactactatatcccaacccctctagcctcccagggggctggtagtacgttcactcaggtgtccatgaaacagtgcatgttctatgtatgcagtatcgcaagtactgctgaagaaatagataacgacacagagcattgggtgaagcctaagtgagatagggttcatgtatgttatctcataggactaccttttctgtgaagtactggtgatacgagataatatgaatttcgaagctatcgcagtggcctatcgtccctaccccttcgccaccagatccaatccgacgtatttagatgccggccgctcttttcagggggtttggccaaaccccacatttcataggtgagtacggatagtggttggtcctcaatcttcgcagcaaagcgaaatccagcgaaatgtctaatataccaagtcaatgatctgcaatgttcagatagccgttggggacatgtgcttctggtccttgtctatcctgcccatagcctgaaagccctgggactgcttgacacttgcttttgctaagtgtagtcactgcctcgtactctttgtgcacacggctgcttcagcttggagctctctgacctcccagctactgcggagggtcttgtcgtatggtatctgaacatacattcagatgaagccttcttcagtgggattggcggtattgtggcatgtgaacttcaggacggcgaagggagggccgcccagcttgtcccgctcatcggaggtaagggtctgataatagaccaggcctgatttagctagattatgaccatacagtcacgtgggatttttatgtcccgatggtccatacctacatacagaatgaaccatcattatcttccccagagcttctacagtcataatttacgtagcataggaagttaggatcggtcgctttgctctgcgacacgactatctcggcggactgcggccgccgagatcactggtagatatatggtaacaatcatgcgcttaagctggttggtaatatggcactagtcctaattagatctgtcaagaatgggatatgacccctctaggccctaaacaggaaccttggtttttgttaaggtctagtggtaaattacgctgtacgaaattcgacaagatctataaaatcccctatacggaatcaccacgattatctcccacaataccatgtacaaacgtggtctttccgctgtaaaattctttccgtaaattacgttattaggcctaccgctgtgtatcgttgtgcgtggttctataaagtcctccctatcgcccttcaactttctggctctggctctcctggctgatattaagaactctaacttttctaaaatgacaaaacccgcaatttcaacaatctgtgcggacatcgctaactaactgtaatacacactcttgtatggtatgccgagtaccaatggccggctttctactcccttagcttcctagcttctttggcaatttgtgggtacacctatcttgcgccggtaatggatttgtatcgttatctcttcgacgatctgtgtgataaataattctgtatctactcgtgccgttccgcggaaggcatccatcactaatcaggaacggcgataacggcgaaagggatgattcgacatcgtctttttaagtaaatcgaccgttctcacgtattgtgaatacttcctataaaacgcagagccgcgactaggggtataagaccggctctgatttgcactatggtaaagtaccaaatacaaaattaatctgaattatttctaccaaatgcttctatctcgtaacagcgtaagtcaagtggtccatgtataatcatcctatctctatctaaaatctagggctcactaatctagaaaattatatatacccttctatcagacatgtagttcggcctaggtacgtacctacgccggttcctagtccacagcaaagttcaacgcgccgtatactagcgaggctacggaagtgcataccactaagctattttaggtatgaacttgtccgtagtaccatagagggaacggacgtctctctgacacactctttttagtaaatgtccctcattagaaaatatctgtccctattgagttatcgtccttcaacagaatagtccctaaatctctgtgatatggcttcattagagccgcacaaggttttcctgataacggaattccttgaactgatcctactcgcaactaacacgcgcactttactcgcatccgctcaaagagtcttccgtaaatggcacttcctgattcgggactcgagcgacttacaggctgccctgttttttaagcccgtcaattatactctaccacgcgggacgccgggaattcgcaacccattgctagaagaatgtatatggccatggttttgcggaagacaagcgcacaagtggaaagcgccgctagtagagggaggggcgaagatacctcagatcgatcctcagagcgacgaagtctttctccgaaaaggcgcaagctggaaacgaatgttatttcagcagcctcctcgatcgtgtattggatttatagagaaggatggaaaggccgtgaatggtccggcatataccgaagtgaaagttcaaccgaggggtagccaaggctatttacgaatacgtgacgtggtactcccttgtacgaatatcttgaatgaagttcaccctctgctagatgaaggactactctggtacggatttattgctgaaaggcaactaccattgaatccttgggaagaggaatatcgaacagatagcgagaggtacggagaaatctcgaggagccaggtagcatatactacctcaatatatctgcgggactgtgacattgtgttttttattctagaatgtggatgcgttcgaggacaatgggttagcaatcatggtgctaggatgttacattttcggctctgtcgtatttggatgagtcttgtgcctgggcagatttctattccgatgccggtgacctagatttctaaggatatgtacgttaaatgaagtggcgaaacaagatgttcattgaaaaccaaagcaatacatatttttagctaaaaatggtactcattccaaccggttcgctatagagatatcctcaccggcagagctaatgaatggataatcgtgggaggtatgctcatgggtatgtagtggccggaccatataattaggccttgataagtgctgcagcacctggggaattttggtactgttgtccgtattgaatgataatgttaagacatataaggctgttagattggacagttgatgtgtaagtagactacatgaattggatgattgagttgattaagttgcttagttataatatatttctcgttattatcctttttatatatctagtgcagtggggaaagtcgggatgcctagtttagtggccttgtccttcaggcagagaaaacgaaagcctggttgtcaagtagagtttcggggagcaagtagtctagacggatcatcaccccaagaatgaaaaacgagttgcgagatgtttgtgtactaggagattatatgctatggtgtggtctatgtgatccctatgcttgctagctgaccccccgggatggttggtgttgttgtgtcgtcctcgtcttgcctgcatggccaggctgcccatcgtgcatttccctcttcactatctgctttccactttgcaacttgcttcttcttcctccctatcttagttattctgaattaatgcactcttcaagttctatctttgcaagacctggcacgtcacaattccagcccacttcttagcagatgaaacatctccgacgggtgaagcaatagaggccgtgtcttnnnnnnnnnnnnnnnnnnnnnnnnnnnnnnnnnnnnnnnnnnnnnnnnnnnnnnnnnnnnnnnnnnnnnnnnnnnnnnnnnnnnnnnnnnnnnnnnnnnnnnnnnnnnnnnnnnnnnnnnnnnnnnnnnnnnnnnnnnnnnnnnnnnnnnnnnnnnnnnnnnnnnnnnnnnnnnnnnnnnnnnnnnnnnnnnnnnnnnnnnnnnnnnnnnnnnnnnnnnnnnnnnnnnnnnnnnnnnnnnnnnnnnnnnnnnnnnnnnnnnnnnnnnnnnnncgggagcgcttttagttatgtcacatagccgcttagtcatcctgctctggaaaccactgcagtaaataagtaaaccgcggcgtagccactaagccggctgcaggccattaagcaagtaagtaagtaaataagcagataagcagataagcctacccctaccgcctaaaggctcatatagagtatataacctacactactccatacagtaggtcacattaggacagactttggttcgtccacgctcagcaaactataacccgtatgcgtcaccaccccgagtggtcgcttacgggtagctggtacctctttaatactcccctagctttaaagttatagtatctctaaccccttatttataggaccatacttcttccctttttattgagccttggtttagtactgcagtgttacaatcgctatgtttgtatggtttgcatgtttgttatttgcagcgttacagagtgccggctatataagcaggccctctcccacttctgcacttgcttcttctctcttccttatcttagttatcttcgtcggaatacactcttctgttgtatatgcactctttctttattgatcgacctggaacgtcacatgcagcactagtgctgtaggctggagaagcgcctgcatagtcatacataactagttagactgcaacaggttgattgaactttgattgattgattgagataacgccgagtgtatgatcgtatcactactactctgtcataaggacatcctcaccagccgagctactgaattgacggtcgtgggaggtaggcttacgggaatgctctggagatttttttgacagatcagtcagttccggtggctgtcttgcaaaatatgtgatagtatcgtctagccagattagtcaatatttattctgccagctggattattctgccaaagttagccgatgacatttcaccgcattgattcagagaaaacaaccgtcacgtgacatatacacgaggttacgaagctccgcaattacaagtatgaggtgtaagacgtatgaatcacttattctttactcggcaaaaaattacttttgtcgtagtggtctgatccgtcgcccatactgggctcactgtacaatgtacatacctttggtgcagtccatcacccgccgcaccccacaaggctgatgagccgaaaccttatcgaactagtctaggtccacgggtaaatactaaactcccgtctttctttcttctcacaatctcctctcatcttacatctcatagcaccatcacttggttcatcgcagcaataccatcaaccacactctcgccacaccactaccagctcttcagccacgctcgatcaaccccattattaccaggatgagctggagcacggaaggtgcggagggtgcggagggtacagagggtaccgtcagcgaaagtatcattgccacagatattgtgcttaaagagcatcataagctcttcttcaagctcaaaacctcggcgagaaagttcctgggcaaccatatcgaccgacatgagctcaaggaaacaaccgacaaactagaggataagagcaaacaatataagagcgtccaaatctcagaaataaacgtgaagaatgtagaacagtggctctatcttcaattcgatagccatgatatggagatgaaggacgtatagtcgctccccctctccccctaccttagtacgtaatccaagatatagagaagagggggaagctggctaattgaatatagtgaccacaatgggtcctattgagaaggcttttagccaatctagaactactgaagctagtgctcggtgggttattgactctattattcttaacgcctatacgactgccactttaaatatcaaaaatgcgcagccgttgaatatccaatacgagagggattataatttttggcccagttaccattaaacgaaagagggcgattctctctaggagaccaggctatagagtctggtattgtgacgatctgagaggatcgtacttgcccaacggggcaggagcggtcacgtcctcgtacttgcctgtcaggaccccagtactaagaaggctgatgcctgaggtattgtacctgtcagggtgcgtggggaactgtggactgcgcaggagccatatgtgctgcctacgcagcccccttcttatcatgtgacccacaacctatatattatcctcgcatactgcttctcaggagaagcagctattagttctctaatataccactacgtatactcttgtctctatttcccgatcctccattatatacagtattcccttaggcattccatacctaggggtctcacagttctaatagctcttaaatactcggattgcctgatagagactacccctcgttcataccagttcgtatcatatcgaacctttgtaatacaaggtcgcagggactccctataataccgcagcctaacgaataggcttcgaccgattaaacccttcctcccgctataaataatcctcctacagatacctcggagttgacgtaggaaactactatactactagacctaacgctagcgcagcaccctacgaacccctctttattaacccttaattaactaaggaaacgcgttaaagaagctaaggtaagagaggaatactaaaacctccttgtagaattagaaatcctagagtaagcgaagcctcctactctaataagtataaatgactgtattatactataggttattaaaaaatactatatttgtatactaagagagcctataaacgttaaaccattctatagaaatataatctaggaatactatacctttattaaccaatttcagtcgcactttaataagtactagtaatagtataacttcggcctatataaggtagaggctgtagtcgaataactagataactagagaaataataattagcagtcttatataaagatatttaaagagcctgctatctaataagacttctaagacttctacctatatcttataaataatccttaaaatatctaccgagatagtatactagagtacagtactctatagtagaagtaatattaatctatacagatatttataatacagcttaatactatctatcgttatctaaagcacctatacagtcaacagtaccggaaggagcacctctaggctaaagtaatcgatacagtttatactaagtcgttaaaatagcctatagagctagaaacgtataaagcatatatcggacacctttctataatagaaagttaaatccctaactagcagaaatcgctttatatatagaaagagaaaagcgctagtagcggtaagaataacactactaaatcagatctaagcccagatactagtcttagctctcataccttatttacattaggaacaaagaaacgtaaggataggtttaaaaccaaaggtaaggataagtagggcaataaatctaataagaagcgtaagtataataaataaaaaataaatcccaatagtatcccctatagtaactactttaagtatagaaagccaggccactacatagatacctataaagagaccaaaggggattcacaatcaaaaaactgattgccctagcgctcatagtatcggcagcattagggcttaacggtatcaagcaactaggttaaacagcaccttctatatacagacgcaggcctcccaaaacccatcatggctatagacagccatatagtccactcctatagctcctataagctaaatagtaagctataagatagcaggggtgtggtataccaatatatactctcctataaagcagttaaaataacaggctataacctaatcattagattcaattagctagaagctgttaatcctaatattaactagaaaaactaggtatagtattatcgcctatctagtaagaagattaagaagataactatagcagcctttatataagagattctctacagggcccttatacttacagtatatccttatctaattacaaaaggtaagcctatcccactcttcgctatagtaaagggtacagagaaagctttacctatctaatatttagactaggctaatatctttaatcctaaagaagtaggaaagttactaaagagtaataagtataactatactattaagatagaagtaggcaaataaattccctataagccaatctaccctctttctaagatagaacttacagtactctaagattatatcaaagaatatattaagaagggctagatcaggctattacagagcctaataggtatacccattttatttatactaaagaaggacagaaaattatatctatatatagactaccagggacttaatatattaactcttaaaaactaatatcccctactattaattagtaagactatagattagctatctagtataaagatctttatataacttaatttaaaagatatataccatnnnnnnnnnnnnnnnnnnnnnnnnnnnnnnnnnnnnnnnnnnnnnnnnnnnnnnnnnnnnnnnnnnnnnnnnnnnnnnnnnnnnnnnnnnnnnnnnnnnnnnnnnnnnnnnnnnnnnnnnnnnnnnnnnnnnnnnnnnnnnnnnnnnnnnnnnnnnnnnnnnnnnnnnnnnnnnnnnnnnnnnnnnnnnnnnnnnnnnnnnnnnnnnnnnnnnnnnnnnnnnnnnnnnnnnnnnnnnnnnnnnnnnnnnnnnnnnnnnnnnnnnnnnnnnnnnnnnnnnnnnnnnnnnnnnnnnnnnnnnnnnnnnnnnnnnnnnnnnnnnnnnnnnnnnnnnnnnnnnnnnnnnnnnnnnnnnnnnnnnnnnnnnnnnnnnnnnnnnnnnnnnnnnnnnnnnnnnnnnnnnnnnnnnnnnnnnnnnnnnnnnnnnnnnnnnnnnnnnnnnnnnnnnnnnnnnnnnnnnnnnnnnnnnnnnnnnnnnnnnnnnnnnnnnnnnnnnnnnnnnnnnnnnnnnnnnnnnnnnnnnnnnnnnnnnnnnnnnnnnnnnnnnnnnnnnnnnnnnnnnnnnnnnnnnnnnnnnnnnnnnnnnnnnnnnnnnnnnnnnnnnnnnnnnnnnnnnnnnnnnnnnnnnnnnnnnnnnnnnnnnnnnnnnnnnnnnnnnnnnnnnnnnnnnnnnnnnnnnnnnnnnnnnnnnnnnnnnnnnnnnnnnnnnnnnnnnnnnnnnnnnnnnnnnnnnnnnnnnnnnnnnnnnnnnnnnnnnnnnnnnnnnnnnnnnnnnnnnnnnnnnnnnnnnnnnnnnnnnnnnnnnnnnnnnnnnnnnnnnnnnnnnnnnnnnnnnnnnnnnnnnnnnnnnnnnnnnnnnnnnnnnnnnnnnnnnnnnnnnnnnnnnnnnnnnnnnnnnnnnnnnnnnnnnnnnnnnnnnnnnnnnnnnnnnnnnnnnnnnnnnnnnnnnnnnnnnnnnnnnnnnnnnnnnnnnnnnnnnnnnnnnnnnnnnnnnnnnnnnnnnnnnnnnnnnnnnnnnnnnnnnnnnnnnnnnnnnnnnnnnnnnnnnnnnnnnnnnnnnnnnnnnnnnnnnnnnnnnnnnnnnnnnnnnnnnnnnnnnnnnnnnnnnnnnnnnnnnnnnnnnnnnnnnnnnnnnnnnnnnnnnnnnnnnnnnnnnnnnnnnnnnnnnnnnnnnnnnnnnnnnnnnnnnnnnnnnnnnnnnnnnnnnnnnnnnnnnnnnnnnnnnnnnnnnnnnnnnnnnnnnnnnnnnnnnnnnnnnnnnnnnnnnnnnnnnnnnnnnnnnnnnnnnnnnnnnnnnnnnnnnnnnnnnnnnnnnnnnnnnnnnnnnnnnnnnnnnnnnnnnnnnnnnnnnnnnnnnnnnnnnnnnnnnnnnnnnnnnnnnnnnnnnnnnnnnnnnnnnnnnnnnnnnnnnnnnnnnnnnnnnnnnnnnnnnnnnnnnnnnnnnnnnnnnnnnnnnnnnnnnnnnnnnnnnnnnnnnnnnnnnnnnnnnnnnnnnnnnnnnnnnnnnnnnnnnnnnnnnnnnnnnnnnnnnnnnnnnnnnnnnnnnnnnnnnnnnnnnnnnnnnnnnnnnnnnnnnnnnnnnnnnnnnnnnnnnnnnnnnnnnnnnnnnnnnnnnnnnnnnnnnnnnnnnnnnnnnnnnnnnnnnnnnnnnnnnnnnnnnnnnnnnnnnnnnnnnnnnnnnnnnnnnnnnnnnnnnnnnnnnnnnnnnnnnnnnnnnnnnnnnnnnnnnnnnnnnnnnnnnnnnnnnnnnnnnnnnnnnnnnnnnnnnnnnnnnnnnnnnnnnnnnnnnnnnnnnnnnnnnnnnnnnnnnnnnnnnnnnnnnnnnnnnnnnnnnnnnnnnnnnnnnnnnnnnnnnnnnnnnnnnnnnnnnnnnnnnnnnnnnnnnnnnnnnnnnnnnnnnnnnnnnnnnnnnnnnnnnnnnnnnnnnnnnnnnnnnnnnnnnnnnnnnnnnnnnnnnnnnnnnnnnnnnnnnnnnnttacaaaggctggttgaaaattgcggccagcgggagacttacctaaagtagtatggtgggcaacgtgacggtagcaattttcgtgtgtcggtagcatttctctataatagaatagtaagatatataatatagtacttactagtcctaatagatatatttataaagtataccctttatcttccttatataaaagaaattaatatacctaagttagtagatttattatataaacgtataatcctaatcttcggtatactagagaacctagtaagcgatagaggcagcctttttactagctagttttagttaaccttctactttctccttatagttaaacgctagttatctactatattctacccctaaactaatagatagactgaatattaaaactaggtactagagtacttcctataatcgtatattaactaggaataagataactaggtatactagctccctattgcagtatttatatataatataataacttacagtatgaccggaaagtcactgtataaagtattaataggatataatctatctatctaagatagcgttaaagagtaccctaaagagtactatatagatactatatagagggtataagaaatctaagaaataaggagctttataaaagagcgacttactaaggtaaaagagtcgataaagtactatatagataaatattatatagataaatcctttaaggttagtaattaggttnnnnnnnnnnnnnnnnnnnnnnnnnnnnnnnnnnnnnnnnnnnnnnnnnnnnnnnnnnnnnnnnnnnnnnnnnnnnnnnnnnnnnnnnnnnnnnnnnnnnnnnnnnnnnnnnnnnnnnnnnnnnnnnnnnnnnnnnnnnnnnnnnnnnnnnnnnnnnnnnnnnnnnnnnnnnnnnnnnnnnnnnnnnnnnnnnnnnnnnnnnnnnnnnnnnnnnnnnnnnnnnnnnnnnnnnnnnnnnnnnnnnnnnnnnnnnnnnnnnnnnnnnnnnnnnnnnnnnnnnnnnnnnnnnnnnnnnnnnnnnnnnnnnnnnnnngaatatatacctaaaatataagaagctttaattatagattaaaatttagtactatatttcctatacttatatataggtataggcagggtcgttatatctaactagacttaaatactaatagaatagtattaaaaacgcgatagagtagtaaaatagactctgtacttaaggtatcctaggaagtagggactaagtttatagggataaataaagtatcgctaggtatacctatattaggaaccgcactttcctctataatactagtagaagtattaaagaattccttagctttagagatttcccctatattctctacgattcctagggccctaataactttagtaactactataacctctatagcttctataatagtagcggcctttttagccttattagctgtataggttaagcgcttaacgttctgctcgataatatatacttagggtatatgagtatatataggcaatatattaagagcggtataggtagtagactaaacctcagaaggaagctatactattattaataataaattccttcctataataatatagttaaaaaacttatagggatataactatactttatagaagagtagtaagtatatttagtataatctataagggtcttatacttatagtctaagtagctttataactagaaaaagtactattagtaaggtaatagccttttaataagcttagagatttctaaatatagaggtagagttataggcttataacctattaaaagataatattatatttataaatatagagatttattctctttaaaagaagatagtttaggataataatatactattactattctataaatataattaatatataaatataaaaataaggctattttctataaaaaaaggatagatataatattaaaatttcttagtatactatataaaatataatactactaaatctaaagatatatctactatatttactaactaatagtaataccttaattagaataatattatcttaatagaagtataataaaaatttaatagaaatataaattagatatatttactaagtaagtaagataagggattaaagaaaagaagaagatattagaaataaacctaagtatatatatatataatatttccctttatcctaactatattctcttactaataaataattatttagttatacctttatatataggaaatacctaagtttataggctaactaagatactatatttattagagactatagctatctaatctcttagtatagttatataactatactattaccttattatatatactataccctttattatactataccctatattttagagtattaatattagatacctttccctatatacctttttacctttattataaggtttttagatatataggttttaatagactaagctactcccttattttcnnnnnnnnnnnnnnnnnnnnnnnnnnnnnnnnnnnnnnnnnnnnnnnnnnnnnnnnnnnnnnnnnnnnnnnnnnnnnnnnnnnnnnnnnnnnnnnnnnnnnnnnnnnnnnnnnnnnnnnnnnnnnnnnnnnnnnnnnnnnnnnnnnnnnnnnnnnnnnncttgccgcaggaacgactatgccctcgtaccttcccaaaagaacgaacgagaattaagcgagataaacgcaagagtataagaagggaagaacacgcacttagatagtttctctttttcctttcttccttgtacttagaatttggttggaattgcactcttttcctttgaattgaattggctcgtaatataattctaagtactaaaccaactcaacctttagactgtacagctgtataagcggtcattacgaccagttctagcttagtctaaccttttaaaaaaaaatttttttcccttttttcgattataaatatagctcccttaacgagaagctcggtgagctgtggaaagcgacctcttgaagccctatataaagaggatctcgactagctaggcctagctaccctaactcctagcgcctcgacctcgaaccctactataatagaaagtattgagtataatgagataacgaaccttaaagaagaaaatttgatatataatatactctaaggaaccttaaaggaagaacagtttataaccctcgctagttaatataaggacactgtaaaagaaaactaaaaactgattatagaaattgctactctctatactaaggaagcagagacaataaccttaatctagaacttgactcttaaatgcgatgaggtaattgcttacctaaaccttatactataagaaagagactgttatacctactatctcttaaataatgaacctacgacttaaggaacccccttatactctggtataccgattataggagttagaaaaaaccactaagatacctaatgtacctatccttaaggatagaaaggaggtatgattcgaaacttaggaaataattatttagtagaaacttaaggctaatactaactattaccctctccctatctactaaaagatctatatttagagctactataaaggtaaggcctaactctatattatactataaataagtgtagccttaagtaacctataccttaatatttagagccgctgtaaaggtaaggcctaactctatattatactattataaggtagcagacggcaaacgggcttccagatatggccgcaactgcggccgttttaggccgtagatttgccaagcttcgcgccacgcactacttcctctgaccacggccacgcaatctccgcttggcgcagcaacagacacccctcagttttctagcgttccctgagggtgtagcgcctgcatctttggtctccacacttggtactcaggctgcggttttcattcaggtcaacgctgtgtccctcttttctcccaggagccttttccaccatgacacggaaacgctgcgctcagtggaagggctcattatattggggccttcccctgggggtcttgtcggaattttgatatttaatactcaatctgaaagagtttgcctaccttcctatttctttcctggctttccttcatcaagagtaattaccctcaactcctcactggacgattgctcgttcccacagcatggctcgttcccggcgaaaggccaactcatatccgtatgacgatggccatctcagctccgacggctccgacagctcagatgatactggcgatggtcaatatgacacggatcctacagagcctgattgcgaagacgatcagctgaaggatgccagcgatgttgcgcagctctttgcagacaacgagcatttgccagaatactatgtgcagcaacttgagcagtttgacgagtccgtttacacccaggaggattacagcaaaggcactgtatctctccttgaccaagttcatacaagatggaatcagtgagttccagcccttcgttgggaagtctagtacatctgatctttcaatacactatgactaattaaacgcgtcttaggttctgtgcatgtgttcaaaaagaccctcagcaagagttttcgaagttatccgttggtattttgtatacctttttggattgggtattgaatttgcgacgaggtaaaaatggaagacgactacccggaatcaagcggaagagctcgctggaaactttttggaaggtttttcggcttgtttttgaaagagccacatctggcaagattgaaaatcgcatgaatcgacagatgcgccgtgtaagaatccctcttttgccgaatcaaaacaccgttgtccttccaaagacgctttaagtccgcaccgtatagttggcattaaccactcttctaggtcatccgaaaattatcccgaaatcataagttatctcgtaagggccgtgaaaagtccaccatgtacgtggaggacttgacaatggtcgtcgagaccgcgatcagtactacaaaaaagaaatttggacatgggaggcatcgtatcgagctctgcctcttcttgcaacttgctggcctcactgcaaatcgtcctcaggccatattgaatttgatgtaccgtcatattcgagtcagcctgctccgagatccgcaaggtggcccacatagaatcgtgattgagttcaccttcgagttcacaaaagggttccttggcacgaaagacgagtgagtggatatatcaaggacttactatggtcttcagatagttaaccagcatgcaggaacacctatatccttcctgagatcatttttgacccatcgcttgttctcagtccacatgtctctttgctgggcttgctctttggggatcgtgctttcaaacgggtcgagggacaggaggttttgttctctgcagatcagcttcctcgtctaaatattccggcagattgtaatgaacttccattactgctcgatccgtctttagacgatgttccagtattccgacaaacagaacggtcattgcaaggaatgagaatctcccccgacaagcctctaccatactctacactgctcccgtgggttaaaaccattggagtcatcactggatttcgacaagttgctcgcccctacagcttgcgatatggcgctgccaaagcgttggataatagcggtaactcaccttgcatatttatatatcgtgcgcattcacaacttgctaatcatggcttcttttaatttaggttccgtgagcgactctcttcgtaatttgattatgcaccatgccgatactcgcacctttctaaagtactaccttgatagaaggattgataaaaacctacctgccttaattcgcggtctcaatccagacgaggatatcatgcatgcagcctgccggatgagcaggaccatcgatccaaaccggccgcaagacctgacaactgtgcaatcgtcctccgtcaaccaaaggccggaaatcctagcattggtccagcggcgtgacgagcttcgtcaaaaacttggtcgacccctctcgcggcatcgaggcactgtcaaacatgacgcttatagaaagctgaatcaagaaatcaacggcgcgagagaacgggccagaaatgcgttgctatcacagattcaggaaaaatatgaccaagagcaacctatgctagaagttcaacgacagttgtccgaggctacgcttgaaaaagaggtcaaaaccaaactggaacgatcagaggagcttcctctacctcaaaagcgtctgatcgaatgcctattgagtttgccacctccaacgttggaacaagagatgcgtcggcgaactgaagcaatcgatgctgtcgctgcttactgtcaatttgaggaaggggaaacgtgccgtctgccgcgaaacaaacgttttgagaatgatatgatcgagctagataatcctggcaataacccctcagaagatgaagcgtccgagaacatgtctcaaccagattctcctcttgaggctgctttccgatctatcatgaaggatcaccgacctctgttttgctttatttgtctaggacaaaaaaagctggatatgacgaagcgtgtgcagcaatttgcatcgcatggtgatgtttcgaagcatatcaagcgaaagcatcttcaaaaaattgcagctggcaccgtaatctcgtgcaatatatgtgatcaaaaatttgataaagttatgcattttcagcgccatgcaatcgattttcactcgactgtgacggggtcagtggcctccaatcatcaatgaatgacttctttccttggctttgtatgaaccaaaattgaatctagtgtctatgtcatatgcaagctatagctgtaaagttcaaggattggaggtctattggtagtaagcatcagcatgaacgaaaaagctgccttgggaacaaaaggaggcttgagtgctatctagctaattgtaattgcattagacaacatagcctcaatgacgtggcatttgagtctgtgatctgatagcgtgtcataaacataattagaatagatagttaagcgttgtatcttagcattaagggcagataactagaaaacaaaaggttcatacttcaccagaaagccctcgagtctcaatcatactctgatagagagcatgtctaagttctgcgctcaaaaacgtaagtgcacgctgcgatgacttcggaattttcacgtaattgaccaagcagttgaatttgttgggcttgaatggcttaagcttgagattgttttatggctatatctctacgttccacaactgtcgaatgcatccattttcaaggtaagtcctcacttaaatctgaaaaccaacggatcttaaccgcggcataaaagatccgtaagcatctgcttcggaacgagctccagtatgacgagcttcttttggcaatagagccgacaccacattttgatagctcgtcagaatctgccgcaactctcttctttcacaatatcggcacaaaggtcatccaaggttacctagagccatctctatctatggtgcccattcgggttcttctctccgggcatctagacaagcgtcgagaagggatcgtaaacctcaccaggagtgtgaaagaatgctcaaatagggaaagtgacaatctaacgctcgcccacttccaggaacatacaccatacaaaccatggaaccaagaacagcaattacgcaccaaggatgaaatgttccatcaaagttactcgcaccttgctataaagcagatttatgaggatcataaatatacaagtgcactgaaagagataggagattccgagtgctgttcaccggaatacagtttgattcgactggggtttgatcctccaaggtggtgtgctgtggctcaatatagaggagtcaaatcatctgcagaaggaagttctaaaagagcagcaaaacactcagcctccaaatcactttggctgcaaatggggggtgagccgatcgcttagttaaaatatctatacgacaaacccttaaaattgctttggttcttgggctgcctaggtctactggggtttgaaggaagaactgcccttgaagatattcattcaatcgctaatttgactggcttttaccttttccttattgtatctcggaacaaggcaaatgaagtcctgaccgtgagaagaattcacagagatccagagagattgctcaagatagagtagtttagttcgggtcgcttctgcatcagagctgcgaagcgggggcaccgcacaaggagtctcgatcgcgatgcggcataatcaaccaccaatgtgtataaatcatcagccttatctagtccactgatcaagaacaaaagcttgactacaccttcaattcgacaagaatccaagatcatgtgctcaagaacatgaactagcttccacaaagtcaaacggtcaagtgtgtccatgccgtgcttttttgcgaatatatgcagtcgtgcatgtgtaagtaatgcatcaatgttttggcaaatgttttctgtttccctgcaaattggctggatgggtgtttgcgggaagttttctgccagatggtccaaaagctgctgagtactcgcacgggtccgaaaatagttattcttgagcactagaaccttctcgaatgcgacttgagttctatcttcacaagctatatgagccgagtcatcctccaagactgaaatttgatagtccccgacataaagatattgaagtacatagctgaaaatatcctctatgtcatcatggaatccaatggcgtatttagaaaggtcaagtggagagcaaacgcgtgcgatacgtttattgaggacgctggcatgggcactaaattctttttcatttggtcccactttgaaatacacgatcggggaatcaaggtcactaaggaaacatcagcgcaatgcatttcaacatgggaggtgggggctatgagaactcaccctggatgcggtagaagcatgattgatggggaagaaggtcggcaatcgaaatcggggaaaatttgtggcttttaaatagctggccagccctcaatgaggagggactgaccctcagtgagggttggcaattgtaaaattcttgctggcctcagtgaggacaaacgacggaaaggagtgtttcaatgctttaccagaaacgggcttctgaggtgtctgtggttacttgcaaagtactgtgaaatacagtggtattcgaaatctttttacctgcaatctctctaaacctgatgacgaatatcactgtaagtcctcttgacaagagccagatacttcagctgcattgtgcgctccatgatggtaatttcactcgaatatgacagagcttctgattgtcgatacatatcacaatgatctttgggacatgacggtgatatctgtagcttttctcattggtttttgtcgaggtaaatgtgtacaattatattgcttattgggagaaacgaggagcaagccagtttacaatcggacaagcatctaagcttcctagtaaaaaagactgattacagggcttgggggcccagagacagtgaaggctctgtggtactattctgatggcccgagaggatcgaagcccctgttcagcatatgtttgttgtcagaaggccaccaaggctgttagattagagactcaaatctcaggcgattataagaaacatacttgaaggctgatgacatgtaacctgaaatgaaagtctgctcatataagactacgtactagggctcggtgacaccgacccgagggcggtggacacagatccagagacccagtagattccaagaccgcggtctcaagacctaccaggccattagaatgccaacctatatcccctacaatttcacgacccgctaagccataagtctcagagcttaatacacctagtgactcaagactagctcgaaacctgactacgttattctatcgtcagaatcagttgccgcccttcgctgagcgtccgttttcatcatctcggccaccgcagccactttggctcgtgtcactacaagatcttgttgtaggctcatgaggacggtattcgatccatcatccatcgcggctcggacacattgagcagcgctgacaagtcgtaggttcttgttgtagaagcgtgcatgtttgttgtccttgcgggcatacttgtgagctatacgatgtgcttccgatggatcatttgggttgaccggcacttggtccgtcacgtgccatcccccattctcataagctttgaaagtaatcgtgattgcgttgggtggagggttccgacgtgggcggagcgcttccggcagaagtggaactgtgaactcgcttatgttttggcctgaggcgggagcctcttgcgagtcattcttattttcgcgcagcttctttttgttcgccttttgaacatgctctttgggttcctgaggcttaggaacttgtgatgccatatcatgatgggttgtttggccatctgcatgttctccttggttgagcccgccatctcccgtggcccctgctgaattttgaagcgctgcgggtcgaggtgggccagtatattcacctatgatcggacctgaggccgaaggctcaagcaaatcgcccagaaactcgcgaggtcccatgttgtccgtgccctgttcagggtccgaggatctctggtgaccaaaaggcgttaaactcgtggcctgaccgaggatgggcgactcagcctgctcttgccggtcgatttcatcctctcccacaaccattgctgcatccagcccaattaagtcaatttgagtaatggcctttgctgctcgggtgcttcgtgccactcgaccttgccgaacaatcgggtcaggatcctgagttgtggctggcgaattttcattcgatatgcgagatgcggataatgcgtccacagccggtcccacaccagggctgggaagctctaatgaagcggttggctcattcgtcgacggagaagactgcttttctgatctttttccactagtaagcgcccgtgtctctgcttcctgctcaagctcctgaagggcttgatgtattgcatcttgcgcactctcattttcctcggttatttgattcaggctttcgctttccgcctcgacagggctcggcgtgggttgtagatctatttcagaagaacttcctcttgccaaccggtcttgcatcttagcagacacgacagactccacatatgccattgagacgttctcgccgcttcgtgaagagtcttgggaatattgcgaggcggtattttcgttcatatctgtttgtcgctccgcagtatcatgtccatttagatttttacttgatggttcgtgtctagtgtcttccaagtagcgccttgtgccactgccttgaggcagcacttgctcgtcttgcttggaatttggcaatatctctgggtcctcctcaacgtctcttctggtatcgtggagtaaatcgttctgtatcgctaaatgatcatccccaccaatgcgactctcagtataggatcctgccatggaaatttcttcactaccaggaatgacatgagcgaggtcaacgtcattcatatccatatcatgatcaacagtggtggagtcaactgaatcagccggcacggctggatgcaagtcggcaatttcctgtcgtcggtctcggtgtaaatggcttccagcctcctgccttcgatggtgtagttctcggcggtgttctcgacgtgattgtctttgtggagctgatcctgtagccgagaccgctcgtggggtgcttggcaggtcattgactggtacaaacagaggggatctagaaacttccgtttgcagcagctcaggcgaagctataccatggtcttggcgttgcgcccatgtcaaaggcttgtcgaagaaagcaaaatacacgctctgtctgacaaaaaaggaggagataatctgctgccctgttgcttctttggaatgcactttgtctaggaaaaggtgaggtcgatctatcggctgcacatgctgcaatgggggaccacaacgaagggcaagcgttggtgcccgaccaagaacaagctctggagagggcgtagactcgtgagcgactgcggtaccaaaacactccactaatcggtcaatcagtgaatcgaatgtgatagggtcatatcgatagctacccggtttccgggccttgagtagagcttcgcgagcaattcgtcggtcgggggaacagctcaacattttagtgatgggcaaagagtcgaatcccaatttctgtgcgagcgtagccatgttgtggagaactacttcatccgctcttccgcggatggccttggcaatgactttcttgctggtagcctccttagccatttccgggtaatgacgcatagcaaataaccagatttgtcgataggcgagttcaaaagaatccatacttgggcctgtgtggttccgaaagcgcgcctccgatgtctgcacaagacatgtacccctggtcatgtcagggttataaacatgcttcaaggcggctcgcaccgttggctcgttcttgcttataacagcaagttgccgcacaccggttgcgcacgcctcgagatatgcagtatcgcggaaaaaggtgtgaattgaagggatgatcccatcataagtggacattcgattccatattccagatcgttcagtctcaccaaactgggggaagacttcgccgctgagtatatagccttttacttctctcgcatccgcaaaacatgccaccggggctctgagctgaagcttttccacggtatgaatgtcgattttggccatttgatgtcgatcactatccactatagtcgaccagaatctttcaacatgttttaaataatggataaattccttcgtcgttagcaagaattaggtgaaagctgtgggaggcgatgataactaacttcatcgcacttcaatgctagtacacgattgagagagccaatactcaggccattccacagacctggaatgggcaatagggcatcgaaggcagcgcaaatgtcgacgttgtcaggtgacatcagttgtcgcaaacgcttagctttattttctgaaagccgcgcccaccaccgcttctgaaacggtgcattatgctcgttttggtattgccgaattttgcggtatatatttccatcagtgggtgttttctcgtttgcatattcatcgactagtgtatttcgtaactcagtgctaatgtctacataaagtcagaccgagagatttaaagaggaaggctgtaaagtagaagttgtgccaaataaaaaaaatctcaccatctagatagaggtccaccgtccaccattgctcactaggagcaaggacttctgctgctgcacgcaggcggtgttgaccatgaaggcattggatttggctagaggggaaagacaggaacgggtatttatcaggcagactagttagcaattcctccgcggttatttgtgcctcccgacgggcgtgcttcaagtgtcggcgggttacaacagctgtcacatgatgttgtacatccagtcgattgcagccatccttccgaaagacttcgcataatctctccacgttcttttggtccagttgtcgagccacgcctgggtgacatgttatctggctcagagttatcttggcagttccttggtacttcaggcgccgctcagttgtcagttgtagctccgcatccgtgaacatggattgttccatctcttaatccctcgataagtcttcgtcaaaacgtggattgagaaccggccaccagagcgcttttaagttcttaggttgttaaatggccattggaaatggcagggctcgctgcggatggcctcgttgtggatggaagctcgaaggtgccctacaaaaacagtgctactgctgtccccacggtatccaatttcttttcctcaagtatcttttagagactatattcaaacatggaaagagatcaagacaagcggtctactcggtttgatatgctgcaagcccaggcgcatttctcttcgtcggtcacggcagcagaaacgcagcctcataatcctactaaccagccaggccatgctcaaagcccaatcaaataccaaaagagtcctgcagctcagaaagatcgttctcgcaagactctggaaggtccgccaaaaacactggagcttcccaccaatgtcagtaccggagggttggcgaagactctacttatacgaacttgttccccgtgggagacctataaacccatatttacatgtgatcttgccggtatagtatcaattagtgaacaccgtcaccggggctccaaagtagtcgccatacgaagttcgtcaagaatggatagagaggatctactccacaaatatacgcgcttcgatcacatcaacataatttctgccagtgaatgtttcaaggacaatggcgtaaaccattatattgtcgatgacctaccaatcaccttagagcacctggtcgccagcgatgcctatcccagtgaggttcagctggcttccattctcaaacaagtgagtcttaatactgtctttttccaaaggacggtcttgctaatatgagaaaggtcatagacggattgtcttatctgattgaatgcggctatgagcattcgtctttaaagtgctccactacactaatgagtctagacggagtggtgaaaattggtattttacttgacacttcagaatggctggtgaaagactgactgtcgtgatagctagcttggaacaaactgtgccctacacgtcggaacgatcccaatctttgtccctgaaaagcttgggatctctaacaatggaacttatgcagaagtatgtgaaagagaatgtggggatagatgatccagctcggtggcccgtcgattcgaatgcggttgactttctatcgtcgacaacgtcagcaaggtctgtgaaggagcttacaaaggtaagcagtggcaatacccttactgaatcataaacttacagccttcagcatccactcattgcagcatcctgttccaccggcagcttggttgggctagcgcgacttgccattgtctctgcatgcactttttattcctacagagagtgaattttggagatttatttgatcgtatgttctcatttgatgatatttgaatctaattctcttttattcttgtacatataagaaaagaattgtttgatcgacaggtaaccgataaccgtttacatgtaccttgacctgcatgatcatatgatgatttgtagaccatattatcgacttaaacggccttgatctagtcgcaatattatagctcggcggcctgattgatggaaagaaatttctcgagccttaagccaggctcgatgagaaacaacgaaagatcgctcattttgaccaattgacctagacatgagtggtatgtactactaaccagtagagatacattatattcacttccgaattgactcggattcctcggtatctgtaggcatccacttgcatacctccttttgataattcatccctatttgacattcggtggattcactgtaatatgtaccatttgatttccaattatttgcctctttcatgcttattatagaataagatgacttataattgaagctttggctcttcggctatgagaattagttgtaatttccactcaattccggttgtgtccttcgggtagtcggcagtatcggtgttcattgatcggcgtttatcttcggcctctgagaatactaaaggcacccgattcggcgagcatcgtcatgaaagtgatttcccggccggtagggtgaattcaattccttgatgattaggaatgggcctttgcaatccaaacatgaatcaggatggcgtcgagtcgttcgcacattttatgcccacgtgagtgactatctagcatgataaggattttccgtaagtcttcctactaactagcagtcgaggtggttctccataaatatgggaacaggagttgtttccattttactcaatacaccgccatacaatgggaaatggctatattacctatgtataatcgtatctgccctgaacgtggcatatcttgtcatgttcttagccatcagtttgctgcgctacaccctatatcccgagatggcccgtattgagccaagaccaatgagtgtacagagaatttggaccctgccctgggaactttgtgccattatggatcagagcctcgttcacccataatctaggtgcccaggactgagaagtacagtgtgacatagccaattcaaggcaaaggttttgtttccaattagtgagactaacttgaattgtccctcgtcttattgtttagtctcacgttttagccaacaatccgtgcctatggaatatgaaacacagtgctaaagtagaccactcgctgtgaccagagttgcacaacaaatatcttagcagaagttgtcatgttttccaatagcctccaacttgacattcatccgtgtcgccctttgagaatagtctttcagtgacttgttatagaataccaggtctcgatagctttggacccctgtctcggtttgtttcctaccggaggcatcaatttccacatcatcgtaacctttgcctctgaagttgggggagctcctaatggggcggatggctagaggtagagaactgctcatccaggtttgtatgtggacgcgatgtgtgctccatgcactacatagacaggacagagctcccagaagccagaccgcgactggaagcacgagccatctccaatggatcgcaacatatgtgatagtaaccatggttctccctgcggtagtgcctctggtgaattgactgcttgacaatggctcataactgacattgccggtaaatgctccatcacgaattgttttcgacatagcagaggcaacattcttgatagcgcaggtcagttgatcattttctgggcaatttgagtttgtgagatttttgtaaaatatggcttccagtgtgtctgttgctgcataggttcccacgccgtcacctgatctttcgaaagaaaaatggtcagagccagcaacaacgtagccattgaagaggtctgtcacgaagctctcaatggctctcattgcctcccaaccaataccgaagatttgagtcccattcattgcaaagttttcctgcaagtcgggtttcaacgtcaaagcgtagtcaccatccaaagttctgttgatagctgtccacttctccaatctttcttcctggtagactcccatattgaccgatgctttgaagctttggacaagtggctgtaaaacacattcagtggcaatgaacagggtgttgttccctatttctgttgagataccaccaccttcggtaggattttgattggagccggctgcaaagatatactgtatgaccgggaatatgctgctctgatgaacagtattcgagcttgcaagcactgtccttacaacgattggctgagcagcgccaccatctggtaagtaccataatgtaacgccgcttttaagcgatagagtgcaattgggatatggtaccccgaagtcactcgatgcgtcttttgactcaaagcaggtacttttcaattgcgaagtaatattggagcacgatgcacctatctccaagctcgccattgcatcccaggtgcagtttcctgtgggacaagtatgttgcggctttgaccagggcaatgtaggatctagattaaaaagagcactatagacgtttgccttcaggataggatcaacgtagaaggctagtatcttctgtcagcaccttgcaagatattgaagaagtctgaacttgaaacgtactgtcaccaccaagtaagggcccaaccgtattatatccccgtgtactagccagcagtgacacctgggaaggatcttcccggtaatgcggaacataatgaactaagttctggacaaatgggtcaaagccaatagagaatatcattgccaagctaccaattgcggcgaggtggctagaggcaaattgtcagcgtaaaccgattgcatcaggtagctgttgaataacatagaacaatattgctggcacataccgtcctttcactagccatagcaacgctacacttccacttaatcctctgctagctaggtcaaaggtatccagatcagacaaagttcggctctgcctggaaaaccagacccatttcatttgacctaggccgttgctgacagcgaatagcaagcaagccttggatagagtgctgagccaggcaacaagagaattcagcgatatatatttccagctcggttgttgccgcccgttgtactttctaagtacagtaacaattgaaatgatcaaagctgccgacacaaagattccagcagcttcccaggcccagtattcgagaaatgcgagagcagaccgcagctgaccttggttatgcttggtgggatgtagctcgtcctggtcgtcttcctgagcttcgaatatggcttgagcttcagttattggctctacctcagatttgaccggagccattggagaagaatcaggcctcattgggaggtaaagcaagacgtatccgcttcttccctgttgtctgttctccgttggttgttgaatgttgatattcacaaatttgagtctctgccttcattaaaaataaagaacggggttattgtaggatacccataataggggtggttgagaaaaatggggccaaaatggaggctaaaagggtgtgctatcgaacttagtaagcattaacccaagcgcagaacgttccgtctccggaggaaatatctctcaggtatccaacggaactaatctaaggggtgtcatgatctaattggatggctcaccccggctgctttggcttgtgaccaacaatcagccgtggctgatagggcacctgcattagcttgacatgcagtgcgacggtctcggtatttcgcatcacaaaagtaccaaacagaatggctagcttaatacgttaccatcctgtcgagacgatatgaatggagtgataggcatataaccctttaaataatccaccgtaggccgaaaacctcggctgggtttagtaagaggattcagttttcgacgtgaggccttaacacacaatattgtttcgtgatgaaaggccgcagaagcatagctatttcgattttggaatatatcgtgaactcaatcatgaattgatggtcattgtagcgataatctgtggataagccattctgggtgctaatgatccttaatcgaacagatggctcacgcggagcggaattggacttgtaataacttgccgcattccggaaagtacttgcatgtttagttgcattagtttcggagctagatcccatttagtccagtcccgatataagcaccatagaggcccataagcctcatgctgttcaccagctgagcgtacaggatggatcgaaatcagtttcaccatttacacacagactcgttctcaaaccctattccaaaacacgctaatctttatctgacttagctttgcttcgaaattcgaaatgtattgaaagtatagcacgtgataaaaggttttataaattacatgaaatggccttgccaaagatacttccgcctcgcagttccctccccccccctccccggttgaaccacttccgtcatccttgccattagcctcttgcaagggcagtttgtcacgataaaaagctctggcttgcacttgaattgcattgagtcaacctaccacacagaaatattctaggaaattacagcacatccagaaattgctgaaaaaaattcgttatatctaacaggcttcagaacagcgttcgtcagccaggagaatatacgaggctaaatctacctgattgtcccagatgcagtgaatttccccgtgaaatttgaaaacaattaaagaaggtgtggacactagatgcactgtgtttcaggttaggcagggtttactcactttgccaattataatattgttgagattagcagggctcttccgaatgtattagtcaatattatgtgacagctgaactcatcatgaacaacagtatcaattcaatgagaccgtccaaattgcagactgctgagaaacacgctccaaaacagagaaagcattgaaatcatgatggaaagcgggatagatgggttttgtaagtctgtgccaagtcgctggggtacaatccatgccaagaagaatactagcagtggtgaaacacagacgaaattgtagaaaatgatccaacgtaggcttatgatttcgcgcgcatagatcccccagaaatcttctcgcttgttgcccgcttcttcgagttcggttttcttctttgggaggaacttcaggatgtcagaggaatgtgctcccagccttctacattcatggtgcaagtgaagtagtggtcgtggtttatgacaggcgtagaaacgtgttgtgaattcgtgctctgagattggcggaatgtcgtccatcggtcttggttgatactcgtaatcggtattcgcatggtcagggaatgaatctttgattctgagcgcgaactcgtggtcatcgaacttgacaaactgcagattttatacttagaacccatcctgaagtacaaaataaaaacacttactttgtaaaagtcacaatgagagtacctccagacgctaaaccagcctcgtaagacacctcggaggcggaaatactccattttcatggtgctaaagaaggtatgacaggtcatattgctaacgcatatttgtgcaagtctataatctccacctttcttagcgagaaagaggacgcggtgcttagtggtgctcatatcggccttgagtcctgagggtggacaatgaagtgaagagttggagggtgcaccgctcggctgctggcctccatgatcttgacaggagatctgactggagattagactagtgttcagggcgctgcgagggttcgagtcaggtatagtatgtgcctctggaggaggctgcgtaatttgagtcgctaaggtattcacgggaaggctcctaattatggactggaggcgtttgacaagggtgtttggtacctccgcctatcgctcttcaccacatacctagataacgaattagggctggatctatgctgtgtaaagttgtctatagtttataaactcacacactcccaccgtaaccgtgtctctgattctgccagcggtctcagacagtgaggtaatggccaccaatcccaaggctctccagtccagcgctcaattaaatactgacagtggctcatgaacctgaaaaatcgagagctattttcgtcacgttcaaattgaatcccgcgggggctcacgtgctgcaattctgtagcaagattccgtagtttataccgagcagcatcggcatggttcttatgttctggatttgaccacctgctcaccagatcccgaaacctggagttcagcgagggttcaataaaatccacgagccgacgataaaggatttggtaggcggtactttccaaaataaaatgcttcatttgatccaaattttgcaaatttccctcatacgggtcatcctcaccagcttcctctgccacagagtcttggtcactttcctcatcatcaggatcaagtacctggattacttcacttgtttgaggagcaggtccgcttctgtgtagactttgaagataagactccacttttctctcgtctgctaggcgtttttcaacagatgttattccattttctgtcttgaaatcgtgaggtttgatgtttggctgatcgtcgataggtaccatagcaaagagctcgcgggtgatcatggccgaatatgagcttatgaatctccttaggtcttggtgcgattcgctgagaatctctgccttgaggttattcgcaaagtgtttcaataatctcctaaaattgtttcgcatcctctcaaatccgaccgagtcttttgatacgccgatcaaaagtaaggaaaagatgactccatcttcattcaacaagtttgcaaactcttggatcaacagcgaattcatctcttctcttgcggagtccaatgatctggtgctaggcatagacactggagcagaaaacactgagtcattctcaatggaggaatcggagtccaccgaacccacatgtctattgcgtacggcagcctctgaggagaagcctagagtatgaagatcctctagccctggcgtctgcctgcgagtctccaaaacctgcacctcaagccgctccgcctctacccaccggccctggttccggtacgtcgatgccagattggccatgcctgtcagcgtatcaggatggtccgcgccgagcttcatcttgcgagtctccaaaacctgcacctcgagccgctccgcctcttcacaccggccctggttccggtacgtcaatgccagattggccatgcctgtcagcgtatcaagatgatccgtgccaagcttcatcttgcgagtctccaaaacctgcacctcgagccgctccgcctcctcccaccgcccctcaagtcggtatgctattgccaacatggctaagctatcaagagcctcttcatgctctggacctagtaaaatcactctctgttctcttgattttgctgccatatcccttgtatttgcgacgctgccgctttgcgacgcataccatgcacctctataaagtagtgtggcccatttgaatagagagtctcgtgatttcggtcgttgggacatagctgaacgaacgtgaggaaagagcgaccggcatttcccccaattttcgtatggactaatagggaactcctggtacaaattgcttataaacctctccctccactggtctatttctccataggatttcaaccacgcgcgcgtagttaattgcactagcctgctcatcctgaatgaagtgctatttttgctgatagatataaatgaataatctctcagcattctgatatcatcttcaaattcagagtcagcatcatattcagatatcccgccatcgctagggtcgtcagggagctctggatcagagttatagctagccttaggttgatgccggataaggttctctggtatcccttgccgatcaaaaaagctcataagagaaagcaatcccgctgcagatggcttgctttggcgtatataatcgattgataattgccacgtgattagaatcgagtttttggcttcccaatctcgggaggagtgatctgcctcttgtatcaataacgctgttgctttgcggtcactgccctggaagtcttttaggtattttgataccgaacagcgaggtgcccgattttgtatatagctagcggcctgcacaatcgctaacggcatgagctccaacgcgttcactaactgttgaccttcttggctttcatctggctgatcgaggtttttttggagaagttctagcgcttcagactgttccataggtttaacctcgataaggtccttatggtcgactatcttcaacgccacctctttggtccgactcgtgataatcacagatccatttcggcttttaggaatatattcccatagtggttttgtcaaggtgtctgttcggctgtttttctgatcttcattctttgccactgaaaatgggcaaagaagttgattgtcatcgacattatcaaggattaatagccattttcctctcttgtcatccccgagccagttctcaaccagtccgaatatattaactttaggatcttgacaacctagaactttgacctggtttgcgatatccctgaaaccttgctcgaagcgggcttcgttgctcgcatgaacccaaaagacccatgttgctggcgactcgaaccgaacccggtagccgtattcgatggcaagttgcgatttccttgtcgttgtaagcaatgagtaataaatcacatactagtcgttttccactcacccgacacctccaaggccaaccagcgcgattctcgaccctggcaacgagcttttctcgtggatgcgatgaagtaggatgtcgcgactgacaaaattcggatcgcgagggaaagggatagttgatagagggctgggtggagtttccggtcgccctagattggatacagcgattagtcacagtcgcgagcttgtcccgctcccctgacttacctagaggccaatggaggaccgagtcgttgttatctccgatctggagtcctttgtttttgccacggaatgatatcgatgccatagtcgaataaacgtgccttgattacgggataaagttcatgagaaggcttttagtctgctactcagctgaaggagtggtaccttaggttcgtcatcaggtgactctcgcggcgctaagagacgggaattgattggcagcaacccacgtagaacattcagtcgatcctgactagggtgaaattagcaccttccaggaacttgctcggcccgggcccgaacacccagatcaagtgcagcactcatcccgtcgcgtttttccccgttttaacggcacgaataaaaaaatacgagatcacgaacgaacgcgtgattgttcaacctgcaatcatattcatgaggtccgtagcttcgagatggccccccgagctcccaggaatctgtggaattgtcaagtcacgtgcatttcctaaaacctagcacccccggactttttacccaaaatcatttcatctgctcactgagcagaggggtgagcaaggggaaaagatggagtcgccccccactctttcttagtggccgaccactgccctgccaacgctctaccctttctactagacgcccggaagaccatacaaggctaatacggaagccgtttttgctgtaatttacaattgtacttgaatactgccaagaaacggagtcaggggtaaagcgaccataataggtatagcttttttcgaaaaagggtttgagatagaatctgtgtataagtggtgagactgatttcgatccatcctgtatcggcatctcaatgcttgcttgcaagctaggggaatccctgccatagccagaaagtggatatcgagcttcatgagcaaccgccacgccagcataggatttgacgacttccgtaccgaattagcactgttggagaacgcgggattggcacaagggtcccccctctctcctatcctctttgcattcttcaacgccgacctagtagaccaatcggtcacccttcacggtggcgcctcggcattcatcgacgactattttcgctggagagtaggccgctcagcggaggagaatttggccaagatacagtccgaggacatcccccggaccgaagcatgggcgcggaggactgggtcctgcttcgcagcccagaagaccgagctcatccacctaaccagaaagaaaaccgaacacctgcatggtcaaatagtcgtaaacgggacggcagtcacaccctcccccacagccaagttactgggtgtcactttcgaccaggagttgcggtggaaggagcacgtgcaacaactgattaagcgtgcaaccaaagtcaccgtcgctttaggcgggctacgacacctgcgcccagaacagatgcgacagctctaccaggcatgcgttaccccagtcgtggattatgcatcaaccgtgtggcacgatccactaagagacaaaacccaccttcgacacctcaacacagtacagagaacctcactggtccgcatcctgtcggcattcagaatttgtgagatgtaggggccgatcgacgttcagcccatccgctgcctgatgagttgcacgtgagtacgaaggtattggtatttcctaataactagaagagggcaataccatagttcactattacgatacatttcaatatactgaaacgcactaaatcaaatatagattagcgcgctacagaatagggtctaagaaggaatctttgagcgctaattttcagaaacaaggtatacagtctgatataaaaacttgaaacaagtaaatcattaatgttttgatgaagtgcaactcaacaacggttttggcaaaatcgttttgcgatgaaggaacaatattacatgtaaatgtttctacaatttcaatgattgaaaaaagaaaccgccgtctgtgacacgagcgaatccatctccacgtcttcccaaactttggaggcctcttgagaagacaaactcgtctcatcctgctcatttactcgtatcagtgtagcttggccgagaaggccgcttttctcttcattcacagccttgaccaggtcatcaggcaattgcccaaacatcattgccttcgtgatatcctccaatgatctgaagaaagaaaggcatccggggcgagcagctttaatatacgttattaatgcgttcatttggctcatggtaaacttctcatttctgctgtaatatcaggtggtatttagtattgagaagggctagcactgtgtcatgatcactcacattaccatagcgagctgttcactgggtacaagtagtactccaagaccaatgccactcgcaagcgtccaccatcgtttgccccagcgatgaaactcattcaactttgctcttccagaatcaaggttttctttgctgaagctttgtattttaatcccatgtaaggctgccaggatcttatcgttggccattgttgtaaatcggtcgtctccagaccgaggttcgtagccaccgaggtcttcattagccctcatttcgcgggcgatttcaagatagatcaagtaaaaacaaacgagtgccatgcggtgttccaagccatacttaagaagtctcttcgactggagtagctcgaaatatttcgcggcagctggcgcactcttttctagaggcggaaatccgaggacgtgcttatcactggacaaatttttgcgccattcctttagttgaggttgtaatagtgcgtgataatctttcacaatcatgtaatccgcaactgtttgaacctcccgcgcttgtttggtgacgttcttctcttttttcttatcaaagcagttttggagcaaaacaaaaattgtttcatttatattgtcttctcgcgactctggctcttttcgtctttttatttttccttgcgaggttgattgttttcgggtccgcttttttggcgtaatagatggcgttgaacccttgtcgcagggtgtgctgcatttagaaataggtgtcgcgtaggtgccgataggtgattgagcagttagtaggatagtggcatttccggttgagctttccacgtgcccttcgttataaagttcctcatggctactggtctccggtgtgaaaccctgaggggggcttcgagcgttctctagtagattcaacgatggttgaaaagccatgtgcatctcttttcggccacccccttgcatatctggagctgaagagtcttccgttcctaggcttgaaattgcatttccgagtgtgtcgaaactcgtatctagtgttatattatggttattctgaactccggtgttcatcgaattggcttgaactgaaatcggcggcttcagaacctgaggcggagggaattcgcagttaataagcttgacattcatgaaattcgagttggcaatgtcagatttgtcgatatcagagtcaacgatgatacatttcgaaacaacagcgccatcaatatcggctttatcaagcactgttgtggtgggtatctggtttttatcggcatacgcggcgataatagtgtctgtaattcgcgaatgtctcatcgtaacgttgatgcaaatcacttgattcatgattgtgtttttgatcttgctgttggtaatgaaagcaaaattgatgacattcccagtagcggggacggtgtcaaagctttgcaaaatgttccaatcagatgtgaaatcaagacaatcgtcaaattgtggatcaaaaagctgattcaatacaggacttggcgcttgtgcttgttgatttcccgagtcaattgtatcgtatataagaccggtagattcggtttgttcggactgagctgagggatccatcatcttttctttcattgtcagctcacactaatatgtcataattgcttttagaagaaaaagaaaagcagtttaccttagattttacttctcaatgctcaaagtttcaggtgggtttcaatgtccaattccaagcattggcaattctggtgtagcggaggcaggtctccgtaaacaataaaagtagaagccgcgttggtatgaaatgaaggaaccaaaaataactgaataaatcctcgtagaaataatagagagtggacggtgagaacgcatctaaagggagggatgcgaggcaaagagcgaagaatggaaaacaaggagatataaacatcatgggaaatgatcagtcacgttccctgagcagaatcgttcagaaactctgagattagaaggacaaaatgcattgctcaaaacacatgacatcataaaactgagcagagctgagcactaaagtgtggccgcgacaccaattcgtagtcgcagaaagctatcgtggcctaaataacggtgccgctttccgaagagtgtcgcagccccgctcaataactcgtgctccaaaacggtgtcgcaggccccaaaattcgaaacacccggatgacttgactattgtaaattcatatcacctaagaatacagtattctcgcataaccagatctgccacggataatttaatccaatacatgctaagaatacaactcccaggccatctgctccgcaatcaacaaaccagagcctctcggagctatggctgatactcgagctcgatcatttgtaggcgttggtgtaaatatcctcgagcaatatgtcgcagattatctcgcaagcgtgccgaggcggaagctacaaacatatccatgtcagcttttggcaatatatcctgtttttagaaccctactgattaatagcatttggcctctctcatctcgaatattggggagtctctcgattttttcaccggaaacctctgcgggaatgatgattgagtagtccggtgtgccctgatatagaaacgctcggtcgtgcttgccaaaaggcaatttctcatgcgagagaagccctcgcccaacgtagacagatatggcaagtatctaaggctccatcagcttgctggtcatagaaaaatcacattgaacgaacgtagccatcatccagcacatcgtcttttaacaaatcgttcaggaggccttgcatggaaatagcaacatctatatagttagcctgtcccctcctgttcgtcggcagcaagaaaaccaaccaagcgattctacctgccatatcaagtgcatcctgcggacatgcgatgtgcacgtattatacccatggatcaatttcttcgcataaggaatgatggcggcaattcctgccccacttgccaccaacagcacactctcatatttgtccacacactcgctgattccgtggggaccactataaagggccaacgaagaaaagtttccctttggtgctgcgtgcgcctgacggacaagagttttggtgagccctccacgaggctctaccaagagatccaacacaccttgatctgtccgagaccaagacgtgatcataaatggatgcgtctgcacccatgaccataagcctagtgaaggcagccacaggttgatgtattgtccggccattgctttgatcggcctcggtaggatgaggcggactcgaatgggcgttgccctcgcgtgttggcctgcattttctgcgtcgcgctcattcttatggcagatcgcaatagctctcgggcatccgttgcccgaaaatagaccgttcctataaagaaagagtatcaagtgggagaaggatgtactgcccaaaatccccaatgcaatatagagatacaaccgggaggaatacttttcactgggaagatgccgccaaatcccataaacacttacgactgcgagtgcctgatgaagtcgaagaaacaactcgtatgaaagtctccgacagaaaggcaaggataatatgacaagggagcacagacatccagcgccctaaatttcataaagctgttagatcagatccagatagtgactgattcactttacaaacaattattgcagagagacgcccagtatttatctcctgatcctcatgggttttgccctgtagcatggccaaaacgtgaaacactaccaaagctaccaccatccagcctgcagcgcgatgcatccgtcggtaaattctcagagaaatcccgagaatatcagccaagttgctcaaatgccatgaagccagaaggaatatcatattgagtagcgacagagttcccgctcggcgacctgaggctgccatagatatactgttgaagaacaggagcagcaggttgattgcgaggtagatcaaatgaagaaaaacaccggctcgtgtccaaggccccagaagtgaatggcgaccaagaacatacggatatgcaagatgttggtaaatgaagacattcatcgcgttactccagggcgcaaagactttcaaggctctatagataacaagacttaggaagatgccaccaatggcgatcgcataaatagtcaagatatccatgttgcgaactgaaagcaaagtgaagcccggtctgttatgtccttcttatagaggaagtatcagttacaagtcgaccttaaaataggtcgctgagagtaagtatactcgacaaaccctaggagttaggtacttggtcgctgtggatggttcgagcagcataatgaatgctacttccttgcggaataccgaggacccccactgagaccttgagcaaagacttattaaccacgaagcggacaaggttacagtaattcgaaatattatcatatatccaatggctccaagttccgaacttatctctacaatcactgccaaacaagacagccctcgcgcgagagcacagaaagtacgcaggcgcagaaaaggtcttttcaaaaaggcagctgagtacagtattaactgtgagtcggacgtcgttgtagccgtccgaaatcggcaaagtggtcaactatatatcttcgagtcaagtaagaagaagtggcttccggcagaaatggacatggtatgaattttttgtcgtgctggaagccatcttgcttatcaacttacaggacaattattatccacggccaattacggagaccacggaagacattattccttgcttggagaggttggaagaggaagaattgcgggcggatatagaatgaattaatatatctatgttattgtcacagtatcgttgtggggagatatctcgtacttgtatagaaggctagaaaatagaaagcgactatagggctgtgctgtcctgttccatcacgttgagggagattttatcaattaacagcatcaaataattcggtacggtcatgtgtagactccagtctttgatgaaagagctcacgtgatcgtatcgaatattcgacacggtcacgtggtaccagaaccttctccggaagttccactatcccctgcccccctcagtgcgaaggaacaaagattttccatccgcgctcggagtgcattgagcgctctgtctacgtaagccttcgtaaggcccatagctcaccttcattggtccattctcagttcacatgatcttcctgcaccgggcattgattaattcagacctgttgaaatgggcctacttttttaaccaccccgttcaacttccactccgtttctcacctgttgcctttaagatgatcaaaaaattcgtgcttatacgctttttcaggagtgatttagtgtttagaaatgccgcgtataccttgtataccttgtatacattcaatcctcttttcaggctatgtttatcgagttgtcgaagtatgatgcgaattcaacacccctcatgatcagagagggtgagcgagtccgaaatgaacaccgggcagagggcgaatcccccccattcaggtcttcttcgcccgcccatctctctacgatactctactccacgaaaccttccagtggcccggccaaatcacagctttcgtcactggactttctatttcgctacccaaagcttttgtgtcggaaatgctccaacttaaattaactctaaatgtgagttgttttcttgcttgaatctctcatcatctgacgttgcctacagaacactcatgatacagagcagaacattctcaatgacttactaccccctccgtcagccgataaggtttgtcatttccacctccgaccggtcgcaaggtatctaattcaattgtagattgcacgcttactctgccactgttgcaatattctatcttccctttctcgcgataagatcgccctcctctacgagcgagcccgaacgagcacagattgtcttgtcgactttgatataaaggaatactgccaagtgaagtcgcctgcagcaggtacctcgacctttggtagtgtcgcacatactagatcgcttgagccagcctacatcggtaatattttatgtttctaacgcacgaaaattaccgttacttactttgctcaacttttagatccttccttactcacgacgagtatgaacgtacgagaccgcaagatagcgccctgtgtttcaacacctgatcctagccattttccaaccctggcactttcgaacgcgggagtcatgttgagtcaagcagcctcacccccacgcggtaatattcaaaaccctacagagatcgggctattggcgtttaaacaaaggctaacttaggaatatagaaacagtccccaatctccataccaatccgtctcccgtcatcccacacgatggttgtctctccaataagttcgactgggcactccgagaatataacaatctaaacgcaccagacccttcactcaatttcgctcctagatcctgcgatccaacaaaagaaggtgattcatccatagtacatttgacaggagggtccgaaggtcaataggctcccggcatagctttcgataaagatggtcccatagctagcatcccaacgtctcaatctcctgtatacggccgccctgtagggataggtaagaggtcaccagaaattccaccgcatcatgcttccgctggtattatggaagaagggggtttgaatgagatggaagtatcggatgctgaagaagaagcacaacaagatatcacgggcaaaaatccaattgaaaatcgcccagccgatggattatcctctccatctctatatccagttgcaggtatctcttatcccacacctagttcaaatccgccggatacgtcagtcccaacgactaggcgtgtagagcgatcggcagaagtgacaacaagcgacgttaactcagaagatcgaactgtcgacaaatatcagagtgcacgcaccctctcgaaattacagccaacagtcgaagatacccctgataataccgaaattgataattcagagactttatctgtcaatgacgaagacttattgatggatgaagactttagagagtcggacattaagtccgccttggacgatgtggtcaagtttttgcaggacacttcttacaatagtgggaccccttcaactagtgccaatacttccgtaaataccaagtcaaatccaaaaagattaactccagtgtctatctctcctacctccaatagaagcgaccagcataagcttatcaatgggaaacaacagaccaataatattcaagagactttagagtataaacgccgccagatcttacagcagaaacggaagcttcctgccagacttgaaccacactcaactctctacaccaggaacctcaggccccgtcttaacaggggaaaaagtgggaatcaagccccacatgacgacaaacttacagaggatgttggcaaaaattcatcctcggaaggagtcctagcaggttcagtggccaaaagtcgcgcagattcttcaagtattactcatctcaagacatcggtaccctccaattcagataaagacaaatagagtggtcccttattataccattctctcctgtccactctatcatcagaaaaaaaaagccgagattaaaaggaaatgcaatcgtatcttacgacctgatttgcctaagttcatagaaaagcacaccaaatcatagaaggctaccggattttaggattctccacagcttagcgtggagaatcattccctcgtatcctccaacacgaaaggctttacaatttagagatacgtagatactatacagacaggcgaagagacacattacctcaaatctcgacttacagatatcatactttatttagcgtatatcaaagaacttcgcagacaaaaagataccggtcatcccccccagactgcgaaggtcaaagccacagacatcatctatagcacagcgtccctttctaaaccattagcagagaaaactcagaagacttttcacgagcacaagctagttggtgagcgctagtagtggtccggttaccatctcggacatggattttttctcttatatagtcaagaaacgggaaagaaaatgtacagtttctccaagttctctggcttcgcgtcttccgctaattattctacagacaaagcaaaattttttccttagacgcttttattttatatattctttagaactgccagaatattctcgcttattacagaaagttcgaacaatcagtagataagctgttatccggcggcaaattcaccgagcagctttctaagaaagaagtacaattatagatccgcgaggccaaggccgtcagctggaacaacacacataccgcttactggaagccctagagcacaaataccgtggcaagcaaggcgtcggaatttctcttagcccagtcaagctgaacattttcgccgactttgaagctctcactgttcctattagttctcgaatgtatacattcgtttactattacactaacatctacacatctttaagccttaccctgcactcgttacagacgtagttcaattattagcaacatacgagataggctgtgcgcagctacagtgactgcttcgttcggaggttggcaacatttcagcgccgtatcggtttccaattcagcccctacaagcatccacggatatttagataaaccaagtatcgcctagtcactgcttaaattagatacacctttatacggaaacctttattttatattaacttggcgtaggcaggtgtgatacaatcggtaatatcgtgatatttttttaaataaacaatggcaagcgtgacgtttatcctataacactcagcccaggtctagcttggtcgttagacagatactaggctatataccataaggtggatcccgggatttactcacttatttccagtatacagggattctattgtcctttcttttacttcctcgcgctacatcttatatctagagtgaactataagttacatattcttaatattaattattcatcttgaaacactatccacctctaacgtgattccttaccgagcggccatccctgccgagcggccaccccactccaaatttcctatctcctaagcaacctatgttttcaatcatccactatacccctaaaacacactaaaaaagcccaaaaattcatcgaacaggagggcaggatcttattagctatcaaagctattcaaaatagccaaattccttcagtcgcagctactacacgctctttcaacgtccctcgttctaccctgcgggcccgtctaaccggccgaacaaatcggtctgatattcgaccaaacggccataaatttactcaaaataaggaggactcgattcaggattagttaatctctatagattcgagaggtacagctcttacaatcgaaatattacgagatatggccaatttattacttcagcgccggggtgataataccccccagactattagtaaaaactagccaacccaatatcttaaacgacatcccgggcttacaagccgattctctcgcaaatatgactatcggagggccttaatagaagatccaaaggttattatggagtggttcgatctctttcaaaaaactattatcaagtatagggatatttacaactttaataaatcaggctttacaatagggattagtacaacgactaaagtgattacccaatcattttataccggtcggagaggggttttacaagctaggaatcgtgaataggtaactataatcgaggctattagtacatctggatatacgctaccaccatacattattttcaaggggaagaactttatggaaagatggttcgacgacctccctcaccaataggctataaaccatagccctaatagatagacgagtgataagattggtattaattagctacaaaaacactttataccgcatactacaagccgtacgaagggaaaatatcgtcttttggttctcgatagtcacaacagtcacctaacagctcaatttaataagatttgcgaggaaaactatatcataccaatctatatacctgctcatacatctcatcttttacagccccttgatataggctgttttgcggttttaaagaggtcttatagaagccgggttacaggatatacccgattaggcatcaattctatcgaaaaagataactttatcgatatattccctatagctcgtacggatactttcaaagacactattatttatagtgcttttacagctaccggtttagtcccatttaaacctaatcgagtgctatctaagctcaatattcgtcttcaatccccgcccctactagatcggcctagttcgcaaggctcaacatcagatagcaatatctcgactagtatacctcagaacactaagcaactagcaaaacgcaaagctaggatcgatactgtactaggtaataagtcaaataagctatctagccctactaagcgtgatcttgagcagtatcataatataaccctcaagatcatacataagcttattttccaggataaggaaattaagcgattacgggctgcaaatgcaaaacaggtgaaaaagagggctaaatcgacaaagcagatatcctaccagggtagtctaacaaatcgtacgatcgctgatatagatagtaatagtgatattaagagatatatatctaatacaccatctatcccaaccctcccggcagagcccgaactacctattttacctactatacgtcgtcaaatcatatgctctaggtgcagtcagaaagggcatcaaattactagatgccctagagcttagtttagtgaatttaatggcgttttagttgattaattaatgtatgaaaattcggaatactactagggtagccgctcggcagggatagccgctcggcaaggaatcacgttacgtatacgtaagaccctctcattacgtaaccgaataaacttatcggagcatatctatctctctgaaacaatataagatactccttactaaaacctacagtccatttaagatctaagctttaaatttcttataaaaagtagcaatgagatgacactacctctcttcactcaattgtattttggagtagttatatttcaagccattcatactgcagcagttctacggccgactttcgataggtcgggtcaattataagcatacctcgaaggaagtcgatgaagacgggaatttcagcgtcagacatacagtggggtttaataagtctgttcccacccgcattttcacccatgaacattgaaatatatatctttatatatctatgcatagcaccaccatactttactcaatttacttcgaattaaatagggttgaaccctatgccaatctcgggtaaaatttaaatttaatattttgtataatacccctttgccttctgtactgccatatatctgcgccctatacttaaaatcaatgaatcaatcttcgactgcggaatagcatcctatactatctttatataccttttgaatactatctaatcctcctcagaccttcctatatatattagcttaggaaataactcaaaaagtttaacctttagccaccgctatataggttcaatcgggtttaaatctagtgagtgcggcagctactcctctatatatatcccgtgagttttaaaccattcctgtgtgattttagtagtatggatccgagtgttatcttactaaaagatagagtagggtcgatagaatggaagtagaccttcttcgagagtatctatataggaaatagtagtatatcctgtcttcttcgattccgggttaataatattctcccgccttataataatcaactctaatcgacttcttaaccagattgtaccctaaaccatttgtgaaatatctttaatgtataccttagcatttataagatcttttctatagccctccgaccgaaagcgccaacaccattgtggtctgcagtttgttattcgttgtacagaatactcatccgagaagacctagttttaaacgttatttctagaccactcagagcgctatttttgaataaaacgatatcgttgtcgagctaattcctttccgattggaatcttcctttttgtcctatattttagaagaccggttggccttaaaacgttaataatagtagagtgggatagatgactaggtatagtataactcagcgttttataggaccaaaaggggtgctagcgggcgagtataaaaagtaaatggtgagttcgatcactaaagatccttgggcgaccggttcgagggagagatttaatagtattgtgttctttgaaccgtttcaaagtattgtaaatcgttcggcgggagcacctaaaatcgagtgctagctttgactgggtggcaccggcctggtgggcataaataatagctgagcgctgagtaacagatagcttacctgattttgtacgacctaaaccaaggatatccttggttaatgccattggggggtgtgtaggaagaagaaaaaaaaccacgatggttgttagggggatagcaagtggggcagtgggaacagactttttgaacactatgtatcattgggtttaaggaaaggcctttcagcgccatctattagcctttcaagactagtagatatcagatctaagattcgaagaagaccgcctaagcagaattagtaaaattaggaaaatatgatattagcacttcttatttaaaagaaaggcataccatctgtattaaaaaattccgcagttctgtttcctttccgaagaagctcaggcaggaaattaccaagtatttcgattatccttgcgagccggttatcatcaaccgtccacaaaccgttttttaataccactccagaaaaaggcactatcccctagacaaattcaataatctattaaaaattaggagataaaaggcaacctcgccacagtttaagcgaatagattaaatacctataaggcaaccgaggctccagatatcaaccttagtatcctaataggcaccgatcgtgacttctagtactcgtaaagctagagattggattatatctaacagatgattttctgaccaagaagctacagccaaggtaagtgtcgcccagaaagataacaagacaagtgatacatactaacaccgaagtcaactattctaatatacagctcacacatctctgagataagcggcgtcctaataacctctcggagtagctttataataccacacttattactaacctatacaggaacttcagatagatatttatcaatggttttttccggattttccagctcaagcagtatattcgtcggttttagatctatatatcgactataattaataccattattgtgagtaggaggctattcgtaacatatggtattaccggtataaatgattccacactcctcatagaggaaatccaaccctagtagaagctatcgcgctatagttcttactaccttagtaggcaatctcccattttcgtattttacagtttaaaaatccaagtagtggcccaacacgtcaaacacaaagcatatatattgtccatttggccctttgtgtttgaattaatctagaaggggtaacacgtaatatcggccttcatggttactttttctagagatattagataatttcgagagaatttctcgctcaaagatatcatacgagccaccgtagcaatcggctcttagtattttaagagccacatacctttaaacccttcaatactcgataagctacatatttaataaatgtggagaactacactcacttagaatccctagctaaccaaacggtagaatattgtccgtagcctagtttcctcatcactttatatataccggagttgaaagtatctccaagcgaaacgggatagaagcctccagtagaataaaagtctacctcttctattatctagtataggtagggagctcttgacgtttaagaaacaggttcaaagaattttacaagccaagctcgagaatttacccgagtcaaagctcttttaaaagtagtaatcatcttaggatttttttggcaggattagtggcatgaatcttttgcaccggtcatcgaacaaattataaataattccgggggattcccgaacgcttataagttactagacgagatagtcacgtgctcttatagcagcatagctcactcctgtgctaagagcatcacatatatctaaaataattagcgtgtgaaactaagctactgagtgtctatacacgaagaacctctgggactttaaaatgataaaggccgatcttaccataaggcggtcgctctagcttctctgctcgcggctcggcaataactcatctccacggtcgcatcgatatgactcaatgtaggtccttgtttactcgactcgagcatggctccgtccacgaagcatctctttttaattatccagcgaattacacgcaaacctttttagaagattattgatctactctctacattacttaagccgcggggaggattaaatcaatagaacttcattatcatcactagtcgctctcacaggctcagtggactacttatagtaggcaggccatgcccatttttggctaaacgtcatatatttttcaacaacctgcagatataaatataaaaagtttgcaattacacaagcaccccaccccgggtaggttttatatctcagacctcctgacaacgttcaaccaacaaagcctagtaccgacccacaaggaaagcgcagcgcatatcacagcttcaggtgcgatttaagtaacatcacgtgttttaaaccgcacagcgaagtcaacgtatatcaatagatatatctctttatcacaaattcaccatcctctttaatcatctcaacagtccagtactctcctttagggtctaggtttctgggatcattatatttcgctcccctgtattggtaagcaagccgcctttgacacatataaaagcacttacttaacaaccgcttcagagactcctcgcttctccatactatctttgttggcatcatagaactttttgatagccgtctcggcttcactacgcttctcagggctattcttatagatatcttccctaaaccatcttatggccctaaggggatatcctagaataggagttcgaaacataataaatgtaaagataaagaacagaactttagcaataactatccagtttagaaagaaaattgtctttagcttaaaggagggcgaaagatactgctatttaacatttctagtatttcgaactccttaaaattgcgcataaagggcctccaatcgataaacgcttagaccttggcgtgaaattgctaaccaagtacactaaagttcaaactacgaggcaatacgcgcgcggcaggtcagaaatacagtctcggccaatagagactaatatcacctgaacgaaggagcgccaaccccgtagccgtagtgacatacataaggccagactaaacgccactaggtatacccatattctagaccctacatatcaggtagttagcaaatggcataggatatagctacatacggtattacgctattattattttaatcgcgcgtactaaaaccaaaatacatacaaaatagcgttagcggcaaggcgcacgcaaccttccgaaataagcaactaaaagagatcaataataaaggctgaatggggccgatgtcagaccgccctaatacacctgtatatcaatcttgatcaggggtcgtgctgagcagatcagctgtaaagtcctcgaacacgaccaattataccacgtcccttcggatggccatccagaaggctacgtttcgattggtcttcctggcactaaactatatttactctacctagggattcaatcataggaaaaagtaactggtagctaaatatatacctacggggtatatctaaatctctcggccgtctaaaataagttaattttgaaaatacttaggatacaagctagccgttacagtactgtagagtacgtaaaatatatatgcacggataggggaaataaggactacgagaattgcgactcatcctacattctctccagacacaccaatgattcatctttttttacacaacaaagtacaaaatccacgagatcactttccattttgtatgtgtctctatacaatgaacttccggaacggaggactaacatacctcaagattattcgttattactaccttatttttccgacttaggctcccgtcatatgacgttaggccgtaacagccccgcctattcctacatcggacgaaatgtcgacaagacccctcgcttcccaaagcacatctctctatagttggtaagtatcaaaccaggtcgggtaaaaccatcaagctgactttactacagtcaacttctaggctttacgaagaaatagcgggtaagcccctgtgggaaagcgcgaaaacgatattgtcgaatataaggggtcttatccagagcggaagcatggaacgggtcaaagagagtaaattaggctggcaataccaccttttagaggaatacatcgcaataaaagcagatatagaagctcggggtcataaagtatatatcatcttaccacagccattttataatattaatcttacagtccttatctaggtactcgattgcacagtctttcacttcgcattagccgctaggcttaagaaccccacaaaacggctgtggctcgcgcccatacaagggaaatcaaacttaacccgtacagaaaccttactgccgggctcatactgggacattacagacatcgatcgagttctcacgccagaccgcttcaccggctcagacatcctaatagtaacacttgacaggagtggaaaaaattagatacatgaatggttagttgtcaggacacaactagttagtagaaagcaaattgcaatgtatacaacaacgatatatattatgatcataccgagctcttcaatttcaaaacacagaaagcatagggcgttcgtgatatagaaggttattgtcgtaattgcggaggccctcagattagcgttcgctctgggtagtcgataaaatagttctatagccgggattgaagactagagagcggccaggatcaaactgggcgcagagttccatatccaccgtctcatcctagctaaccgaagggatcgtcccgtagtcaaattggttgaatactggagggatgctgccagggtcaaactaggcgccgagatccatatccgccgtttcatcctagctaaccgagggaatcgtcccgtagtcaaattggttgaatactggatagatatggccagggtcaaactgggcgccgagatccatatccatcgtctcatcctagctaaccgaggggatcgtcccgtagtcaaattggttgaatactagagggatactaccagggtcaaactgggcgctaagattcatattcaaggtttcatcttggctgattggccggatcgtttcatagtcacattgattgaaatttggtaaaacttgatccatgtcatatcgggtgcggagttccaagactctactttcatgctcaaaaactggttgtatctgtcttatcaggtatacagccgcttccgtactatgactcctagcagagctcatatctgtttcggtattccttaagtgagtcagaggtcgaggctccgaatcctgattgatcaattcagagatagccagcggaacgcttctttcccgtggcgcttgaatggttaatattgtattgtactcaatcagaggaggctgtcgtctatcatatgaatatgagtccggctagtaaagattgaagcgattgtttgatattgtaggtccagaggtaagtagataactgcgtgtttgctcataattttgtggttcacccaatgtcataagttgacttggaattgtatagagcaaacttccgctaatttcacacccccaagttctttaaatctttcgccacatagtgtgccttgctaccgtcgaaattagaggtactcttataaatgtacgacaaacttaccatcatatcggatttgacaggcagtcaaccataaagatttgtcctttgccaaatcatgccaggcaccagatttccgaagcagatgtttcagagccacgaaacttccatacttgacctcgcgaaacaaggtgaacaataatatcaaaatggctgacactccaacgtgaccatatatccgttcgaaaacgagcaaacgaatgccgtctctaataccatgagatgccgattccttgtttttgaatgaaatagcgtttgatgccaggaacctgttgatgagcccactgttatcgtcaattacctgcggagctagtgaacgccctgacacttgtgacgttccgaaggcttcacgttcccattcatcgaactctattgcgagggacctttgtccaagtccgcgtcggaaacacgcatccagtgagcagccccggttgcaaagtcggatatcgaccacacgagggtcctcttgtacccaatcgtcaccgttctgcgcaagtggatcgggacgagaagataaatatttgaaaaccttttcagatcgacgggcaccctgaagcgcatccataagcctttgagcatccaaggcttctgatgcttcctcggtcgtgtcattgttttcaccagtctcttccacaaacgattgggtagcgcaggatgtcccactgctaggaggtgtttccgagcaagtaatggaagttgttggtgtaggctgctgggaagaatgttggagactggtttccgaccgtggagcctcgctcggaatagtgtctagtgttctctctataattcgcaaggtttgttccaacttggttcggtatggtataaggtcttgagtgctaattgcacccagtctcgacaaattttgaatcgcctcagcaatcgcagatatgtttatcattatggggaagaagttgaaaaatggagaaagtcacggtcgagaagaacgatcaaggccgaaatagcgggcattgttcaccgctcacgaactctcagatgcagcgagtatgtgcgtatgggatccctgctagtgcgccccaaatcatatttcgggcgcactagcaaggacatctcctgcctgtggcgcatttacccctcagctcatcggctgagtcttctcaagaggctgcctgactgcaacctgttggacactatgaactttaaatcttggcccgttgactgcagctaagctgttgttcactaagagataagtttttcttttcttcttttctttttttacactagtagaggatgtcgttggacaggatggggttatcagttctcccccgcttagcgacttgaatgcgattttggtatagtaacatctgaacaagagatgccgactcttctctgtgtatcctgacataaagagccttctgattttctgggctgtcaatcattcgaaatctcatttgagaatccacggcagcgagctatgatttgcttcagcctacagagagtttattgtgcggtttcaaactgcatttcccgcctcttctccttcccaaacagctcgcgcgagacaattctatttgggggcccagaccccaatcgaagtagtatgcatgcacttgcgaaaggcgccatgcctacgatgttggaagaacagccggccttttctcccccttcagactctagtctttctgccaaaaactcagtaccgattcgtttacatgtaagtcaccctttctcgacattaacacaaactctaaccaaataagaccgtacgaatttggttttatcccaaaggttttggacttatggaagacatcaaaagaaagggcctcgaggatgtggtttttgacgccattgttcttccagatgtcagcactcagcatccctcccaggatcctggaatcacaacatccgcagtcttagtggatcttgcagtatttgagatcggcatctctcgggttttagggaaatatgggattctaagattcgatcctctgagcagcgatgatccgattgtcttgcaacaaccagtggaagacctcgactcaaagaaagctctttgctatcagcaccttcatttcaaataccgacaagagtatgaaaaaaggcagcaacttgcagaaatcttgggatatcagatgcaacagattttgacggattggtatgaagcctgtcttcaagacattggcaaacggtttgaaaggctaggataccgttgataaagtagatacattctcattcatcctaataactgattttaccaccaaatgagctcaatacagaaagagtaaaaagtcgaaactcggaggggccgtgtcacacataattcttcgatagtgaacctcaagtatttccctcactgcaatgtcgtgtggttttcgtaggaaagtaatcaaaccctgcgatgcttgagaagatgaagcatcaaaatgccaggtgattacggctagcattaggacagtgccataactgaggtcgtgaaaaacatccccctggagagagagtttctcatcaaggtactgttgtcgaaccctgctgttccgcaaatccttgcagacatctaataataacctagcatcgtggctggtgtcttctggtggtgtccatctcgaaagtaacggagaatccattctcaaaaagagcagagcctctagagcaattcttgccggcttgtataggatctgaagcggaaagggaccaggctttgatataagaatttcgtgatcaccggctaaaggtatgggtactcaccatgatttaattttttttcccttaacggcgaggtgcagtcgatggctcccttcaacaatagaaacaagtctttttatcaccgaaattgaagcacacgcccgaagcattttgtctttattaatgttattatcaagttatctacagtgtttgaaactgtatccaaaataggcctcatgtcttgcctttcttctctctcgttacgtttcattactcctgactggatagggtacctttgggggccggaagaagaccggaaaacaggcgaagatcgagaacctgcagctttcaatcctgtcagtccgtacaagtggaatgaacacgcggtctaccggttggaaaatgataaacctccattcagccctaagaagcctctaccagtatgcctcccaaagagaacagagacgatcagggcatcgcgcatcagatcatttgaagattatgcaagtgagtttttccacaaagggcaggactcctgattgtgccttctcactctttatcacttagagcacagttctccaaatgcctctcttcaatcggacggcaacacagacagagaaattattgagctccacctccctccaagcactcgacttgtcagaggcagagttatcggcgaagtaccccatggattaactctttggaattacaatcagacattcgttgaacatggtgccaaaccttgatcagaacaccgagcctctagtaaggttacttcctcattacttaattctcaagtttgttgactttttatagcttttaggtatctacatattggcggtgctgaaggtatttcgggaggctcgtagttagaaacatggagaatttggaggattgcagacaccgaaagcgaagacaggccttgatatcgagcagagatatctagaagaggaaacaattgggagcaccaaatacaaatagcaatatacacgacgaaattgcaaacccgccaatcttgcatataatgttatactagccacttttcggatttgcaattttgtcgaaaccattactaccatgtaatatgaaggagtaaatattgacgtatagtgaacattttgaattgattcgctagagctctgcagtaaatgacacaccgcgtctgaggtgtgatcatgacctttgctaactatagattacttcaatggaagtgaaaaatagcctggagagatcggctatttgcaaagcaaaggtgggtttcatatatcttcttctttcacaacaggcgttctccaattctcctggttgccttatagccagatttctatgaaaaggcatcaccacgagcgaagcatccatattcttgcaataaaccttcattattttcatataccaagatgaaccattcgcagtcatccactggctcgctcttcgcactccaaaacatgatcaaagttcggtacagcgttatacaaatgatactgatacttaactatctcttcatcgcatcatcaaccgtcgagaatgaatccaagcttcggagagttataattatggaggagaaggaatgggaggcccgcttcgtgcctgggcgctccaacgacatgcaggtagaaaagtggtggatagagacacgaaactttctcacagaagcaggatccctccgtgcgttttcagtggaagatttaaaaggccacctcgggtatatgctcttcatgcttggcgaaatttccctacggccgccctctcccaggttcatgccaaggacgcggcaaaccccttctagaagaccctttgggagtagagcaagtatagctctcatttgctacagcatttcgggagtagccaatatcagtgactatcaatcagttgatccatggttatttgacatgggattcgttcatgatatgctccgccgtcttcaaagatcgcccttattcgataacgacattcggttagacgaactcaaaattgtgctcacaaatctagaagcgattttgtctatggaagatgagcggtccgctttgattcaacctcatccaatcgacatcaaaaatactgttcaaacacaagcttattttgcgacagcatttcgtgcacttgaaccaagcatactattgcaaattttgccgaaatggagaaaactttggatcgaatccagagagaacaacaaagacaaattgcagtgcctgctcaaggaaccaatgactcatggtaggaagcaggacgctattcattttgctgatgccgctttctgacattgacagatatgagagtacaacatattgcacacatctttcaagaagtctcatctatgaatgcactagtgcaagagacaaaggaggtgaagctgttaagaagatccaagcccgatagaatgatacttgttgagatttttcaaatcagaggcatccagcaaagatgcgagaatatgcacctaggttagccgacctgtaccgacgtggcatggcatggactaacatggtgcagcagaaccagtggtagtccacattgcccaggtctcgccaaatccgtgaggtgctcgagccgaacgcccttcaccaagaacaagagaaactacaggaactgggcgagatgagggatctaatcgggacagatgccctaggctgggtttcagatgaggatgagcttgaacggtgtaggggtatcatccagagcaccaaagacggtttgatggaacattcaagcactgagatggataaaattgcggtcctttcccatttccctttcgatgaccacgaacaaaatgcgtgataacttcagatctcgatcttggtagataatatttattcatatatagcttacggacatctgaagatagcttgtcccgaatttgagcaacagatgatcttccacggcgattcgctcgtagttctcgagaccttgttctctactaatcgggaccccaatacctttgatggctacctctttgtggatcccacgactggggcctgcaatataagcagcacggtcacacccaccgaaaagtggctgccatttgccatcggagcctcgacatgccctggacgtcttgctgaaacaagaattacccaggtgtaattctcgagatcttgttctttgctaatcaggacctcaacccctttgatggctaccgctttgtggatcccacgacgggtgcctgcgatataagcagcacggtaacagccaccgaaaagtggctgtcatttgccatcggagcctcgacatgccctgggcgtcttgctggaacaagaattacccaggtcatgttcgccaagatcctatatggctaagatgcagatttggagggtgtcgatgcgcaattatttccaaacggggcggccgaatccggccgcgccggcacaaaatgctttttgtagctaggttgacttcacacacgtacgagatggccctgagctacatcagtatacatcgatatcattgactagttatccttcgctaaagatagacgttgttttctaagtgtagtgctccagtatacctgtattgaccctgagctcctcccagggaatttttgacaaaatcgcttggtcacttccggccaagcaagattttgtttttcccgaagtttcactaataggcgaccctcttccacggaccatggtagaccttttcttgatgcacacgtatgctctgcattgactgtatcgccgcttgtgcttgagttgctggacgtaggtgtcatgtcttcatcgtggtccgagatacatgttgatacaggcgtgtcatttgtggtcgaaggcgagggaaggcagcgaggtaaggcaccctcaaataaccaagacaggaactgtagtcggttattaaccgagagggcggagaattgagcacgaacggtggggaatgaaacgtcgttcttgcagccgagtccgcaagcaaatcggcgggtacgattcttaccgcggctttccacgacacctgcaactttgttgattttggaaagctgccgaataggtttcaccttgcccttggagctatgtcgtctgccacgggagcagacatctttgtccaaaaatcgagaattgccagctggtgattcgcttgaacggattgcgacgcgaggcgtaggctctgccgcttgagtctgcctaacatccgggaaatgatacccgtccaggattgccgggtcgattgttgcatcgtctgaaagatattcagtctgagtagggtttacaggagcctcaacccgagattgctgaccagcagtgaaagcgagcttcgggtcgcctgattcgaagctaggcagttggtgctcagagtcctgaccaatatcaccgaaaattgaactatgatcaacgtttccatggccagatagatcttgcgcatgtaaaatactctcagggtcgaacgtctcaatgtcttcattgaagggtggcggtggctccaaaacctccggcccgactcgaacgatttgtgtgtgtggttgcaaatcgccatgcaaacaaacctccatcggcggacgaacaggaagaggatgcagcttaggtttgggtaaagagactttctggctctctgaaaggggatccctggggtttgagggagacggtgcggcagcgatcgagacgggacttgggtagcgacaggtgttgacaggattccgcgaaggctgcgctttctcttgagtaggattccaagaccgaaaggtctccaagcgataagtggcgcttgacatgttgtgtagagaaggcggcctaaagggttctttggagtctggtggttgggggaacaggggagaagacggggaaagggaaaggggagctgggagagggaggagagggaagaacttggaacgtgaattccaatgttgccatctgagaggaattggcgactcttttatgtatgaaaattgtccgcaaggccaatgccgccctttgcccagtacagaatatcccaatcagctcatatgacccaggccgcgggctctaagacgcaagtaacactagcgcaagtcgaaaaatgttgtagttccggccacggttcacgccaccattaacatcatgctagccctctgcccgtccttgatccgcatgatgcagcaccgatgtcaggtgcgtatgcggcatttccgctattggctcatcacaccgccgaactgtgatatcgaaggctccttgggtaggtgcagagttgaccgtggagaccgacgatgtctccggcggggcgaaaaagcattcgtgagcaggcaactcgaggatcagcgacgccagggctgtgcaatgtaacctcagacgggagctgacgtggctggtggagttgggtgcgcgggctcaaggatggtatccgggacattgcaatggcgaaggaggtcaggaaacgaatagcagaggctaggagctccgggccaggagctccggggggggggatcgagctannnnnnnnnnnnnnnnnnnnnnnnnnnnnnnnnnnnnnnnnnnnnnnnnnnnnnnnnnnnnnnnnnnnnnnnnnnnnnnnnnnnnnnnnnnnnnnnnnnnnnnnnnnnnnnnnnnnnnnnnnnnnnnnnnnnnnnnnnnnnnnnnnnnnnnnnnnnnnnnnnnnnnnnnnnnnnnnnnnnnnnnnnnnnnnnnnnnnnnnnnnnnnnnnnnnnnnnnnnnnnnnnnnnnnnnnnnnnnnnnnnnnnnnnnnnnnnnnnnnnnnnnnnnnnnnnnnnnnnnnnnnnnnnnnnnnnnnnnnnnnnnnnnnnnnnnnnnnnnnnnnnnnnnnnnnnnnnnnnnnnnnnnnnnnnnnnnnnnnnnnnnnnnnnnnnnnnnnnnnnnnnnnnnnnnnnnnnnnnnnnnnnnnnnnnnnnnnnnnnnnnnnnnnnnnnnnnnnnnnnnnnnnnnnnnnnnnnnnnnnnnnnnnnnnnnnnnnnnnnnnnnnnnnnnnnnnnnnnnnnnnnnnnnnnnnnnnnnnnnnnnnnnnnnnnnnnnnnnnnnnnnnnnnnnnnnnnnnnnnnnnnnnnnnnnnnnnnnnnnnnnnnnnnnnnnnnnnnnnnnnnnnnnnnnnnnnnnnnnnnnnnnnnnnnnnnnnnnnnnnnnnnnnnnnnnnnnnnnnnnnnnnnnnnnnnnnnnnnnnnnnnnnnnnnnnnnnnnnnnnnnnnnnnnnnnnnnnnnnnnnnnnnnnnnnnnnnnnnnnnnnnnnnnnnnnnnnnnnnnnnnnnnnnnnnnnnnnnnnnnnnnnnnnnnnnnnnnnnnnnnnnnnnnnnnnnnnnnnnnnnnnnnnnnnnnnnnnnnnnnnnnnnnnnnnnnnnnnnnnnnnnnnnnnnnnnnnnnnnnnnnnnnnnnnnnnnnnnnnnnnnnnnnnnnnnnnnnnnnnnnnnnnnnnnnnnnnnnnnnnnnnnnnnnnnnnnnnnnnnnnnnnnnnnnnnnnnnnnnnnnnnnnnnnnnnnnnnnnnnnnnnnnnnnnnnnnnnnnnnnnnnnnnnnnnnnnnnnnnnnnnnnnnnnnnnnnnnnnnnnnnnnnnnnnnnnnnnnnnnnnnnnnnnnnnnnnnnnnnnnnnnnnnnnnnnnnnnnnnnnnnnnnnnnnnnnnnnnnnnnnnnnnnnnnnnnnnnnnnnnnnnnnnnnnnnnnnnnnnnnnnnnnnnnnnnnnnnnnnnnnnnnnnnnnnnnnnnnnnnnnnnnnnnnnnnnnnnnnnnnnnnnnnnnnnnnnnnnnnnnnnnnnnnnnnnnnnnnnnnnnnnnnnnnnnnnnnnnnnnnnnnnnnnnnnnnnnnnnnnnnnnnnnnnnnnnnnnnnnnnnnnnnnnnnnnnnnnnnnnnnnnnnnnnnnnnnnnnnnnnnnnnnnnnnnnnnnnnnnnnnnnnnnnnnnnnnnnnnnnnnnnnnnnnnnnnnnnnnnnnnnnnnnnnnnnnnnnnnnnnnnnnnnnnnnnnnnnnnnnnnnnnnnnnnnnnnnnnnnnnnnnnnnnnnnnnnnnnnnnnnnnnnnnnnnnnnnnnnnnnnnnnnnnnnnnnnnnnnnnnnnnnnnnnnnnnnnnnnnnnnnnnnnnnnnnnnnnnnnnnnnnnnnnnnnnnnnnnnnnnnnnnnnnnnnnnnnnnnnnnnnnnnnnnnnnnnnnnnnnnnnnnnnnnnnnnnnnnnnnnnnnnnnnnnnnnnnnnnnnnnnnnnnnnnnnnnnnnnnnnnnnnnnnnnnnnnnnnnnnnnnnnnnnnnnnnnnnnnnnnnnnnnnnnnnnnnnnnnnnnnnnnnnnnnnnnnnnnnnnnnnnnnnnnnnnnnnnnnnnnnnnnnnnnnnnnnnnnnnnnnnnnnnnnnnnnnnnnnnnnnnnnnnnnnnnnnnnnnnnnnnnnnnnnnnnnnnnnnnnnnnnnnnnnnnnnnnnnnnnnnnnnnnnnnnnnnnnnnnnnnnnnnnnnnnnnnnnnnnnnnnnnnnnnnnnnnnnnnnnnnnnnnnnnnnnnnnnnnnnnnnnnnnnnnnnnnnnnnnnnnnnnnnnnnnnnnnnnnnnnnnnnnnnnnnnnnnnnnnnnnnnnnnnnnnnnnnnnnnnnnnnnnnnnnnnnnnnnnnnnnnnnnnnnnnnnnnnnnnnnnnnnnnnnnnnnnnnnnnnnnnnnnnnnnnnnnnnnnnnnnnnnnnnnnnnnnnnnnnnnnnnnnnnnnnnnnnnnnnnnnnnnnnnnnnnnnnnnnnnnnnnnnnnnnnnnnnnnnnnnnnnnnnnnnnnnnnnnnnnnnnnnnnnnnnnnnnnnnnnnnnnnnnnnnnnnnnnnnnnnnnnnnnnnnnnnnnnnnnnnnnnnnnnnnnnnnnnnnnnnnnnnnnnnnnnnnnnnnnnnnnnnnnnnnnnnnnnnnnnnnnnnnnnnnnnnnnnnnnnnnnnnnnnnnnnnnnnnnnnnnnnnnnnnnnnnnnnnnnnnnnnnnnnnnnnnnnnnnnnnnnnnnnnnnnnnnnnnnnnnnnnnnnnnnnnnnnnnnnnnnnnnnnnnnnnnnnnnnnnnnnnnnnnnnnnnnnnnnnnnnnnnnnnnnnnnnnnnnnnnnnnnnnnnnnnnnnnnnnnnnnnnnnnnnnnnnnnnnnnnnnnnnnnnnnnnnnnnnnnnnnnnnnnnnnnnnnnnnnnnnnnnnnnnnnnnnnnnnnnnnnnnnnnnnnnnnnnnnnnnnnnnnnnnnnnnnnnnnnnnnnnnnnnnnnnnnnnnnnnnnnnnnnnnnnnnnnnnnnnnnnnnnnnnnnnnnnnnnnnnnnnnnnnnnnnnnnnnnnnnnnnnnnnnnnnnnnnnnnnnnnnnnnnnnnnnnnnnnnnnnnnnnnnnnnnnnnnnnnnnnnnnnnnnnnnnnnnnnnnnnnnnnnnnnnnnnnnnnnnnnnnnnnnnnnnnnnnnnnnnnnnnnnnnnnnnnnnnnnnnnnnnnnnnnnnnnnnnnnnnnnnnnnnnnnnnnnnnnnnnnnnnnnnnnnnnnnnnnnnnnnnnnnnnnnnnnnnnnnnnnnnnnnnnnnnnnnnnnnnnnnnnnnnnnnnnnnnnnnnnnnnnnnnnnnnnnnnnnnnnnnnnnnnnnnnnnnnnnnnnnnnnnnnnnnnnnnnnnnnnnnnnnnnnnnnnnnnnnnnnnnnnnnnnnnnnnnnnnnnnnnnnnnnnnnnnnnnnnnnnnnnnnnnnnnnnnnnnnnnnnnnnnnnnnnnnnnnnnnnnnnnnnnnnnnnnnnnnnnnnnnnnnnnnnnnnnnnnnnnnnnnnnnnnnnnnnnnnnnnnnnnnnnnnnnnnnnnnnnnnnnnnnnnnnnnnnnnnnnnnnnnnnnnnnnnnnnnnnnnnnnnnnnnnnnnnnnnnnnnnnnnnnnnnnnnnnnnnnnnnnnnnnnnnnnnnnnnnnnnnnnnnnnnnnnnnnnnnnnnnnnnnnnnnnnnnnnnnnnnnnnnnnnnnnnnnnnnnnnnnnnnnnnnnnnnnnnnnnnnnnnnnnnnnnnnnnnnnnnnnnnnnnnnnnnnnnnnnnnnnnnnnnnnnnnnnnnnnnnnnnnnnnnnnnnnnnnnnnnnnnnnnnnnnnnnnnnnnnnnnnnnnnnnnnnnnnnnnnnnnnnnnnnnnnnnnnnnnncttctaggacttctacctatatcttataaataatccttaaaatatctactaagatagtatactagaatatagtactctatagtagaagtaatattaatctatacagatatttataatatagctcgatactatctatcgttatctaaagtacctatatagttaatagtactagaaggagtacctctaggccaaagtaatcgatatagtttatactaagtcgttaaaatggcctataaagctagaaatgtataaagtatatatcggatacctttctatagtagaaagtcaaatccccaactagtagaaatcgctttatatatagaaagagaaaagcgctagcggcagtaagaacgatactactaaattagatctaagcctagatactagtcttagctcttataccttatttatattaagaacaaagaaacgtaaggataggtttaaaactaaaggtaaggataagtagggcaataaacctaataagaagcgtaagtataataaataaaaaataaatcctaatagtattccctataataattactttaagtatagaaagctaggctactatatagatacctgtaaagagactaaaggggatttataattaaaaaactgattgccctagcgcttatagtatcggtagtattagggcttaacggtattaagtataagttaaaacttactttcgcttataaagttagtattaaaaccaataatagggagtaaactgtgtaggccctaattaatagtagagctgaaaagacctttataagctagaactaggttaaatagtaccttctatatannnnnnnnnnnnnnnnnnnnnnnnnnnnnnnnnnnnnnnnnnnnnnnnnnnnnnnnnnnnnnnnnnnnnnnnnnnnnnnnnnnnnnnnnnnnnnnnnnnnnnnnnnnnnnnnnnnnnnnnnnnnnnnnnnnnnnnnnnnnnnnnnnnnnnnnnnnnnnnnnnnnnnnnnnnnnnnnnnnnnnnnnnnnnnnnnnnnnnnnnnnnnnnnnnnnnnnnnnnnnnnnnnnnnnnnnnnnnnnnnnnnnnnnnnnnnnnnnnnnnnnnnnnnnnnnnnnnnnnnnnnnnnnnnnnnnnnnnnnnnnnnnnnnnnnnnnnnnnnnnnnnnnnnnnnnnnnnnnnnnnnnnnnnnnnnnnnnnnnnnnnnnnnnnnnnnnnnnnnnnnnnnnnnnnnnnnnnnnnnnnnnnnnnnnnnnnnnnnnnnnnnnnnnnnnnnnnnnnnnnnnnnnnnnnnnnnnnnnnnnnnnnnnnnnnnnnnnnnnnnnnnnnnnnnnnnnnnnnnnnnnnnnnnnnnnnnnnnnnnnnnnnnnnnnnnnnnnnnnnnnnnnnnnnnnnnnnnnnnnnnnnnnnnnnnnnnnnnnnnnnnnnnnnnnnnnnnnnnnnnnnnnnnnnnnnnnnnnnnnnnnnnnnnnnnnnnnnnnnnnnnnnnnnnnnnnnnnnnnnnnnnnnnnnnnnnnnnnnnnnnnnnnnnnnnnnnnnnnnnnnnnnnnnnnnnnnnnnnnnnnnnnnnnnnnnnnnnnnnnnnnnnnnnnnnnnnnnnnnnnnnnnnnnnnnnnnnnnnnnnnnnnnnnnnnnnnnnnnnnnnnnnnnnnnnnnnnnnnnnnnnnnnnnnnnnnnnnnnnnnnnnnnnnnnnnnnnnnnnnnnnnnnnnnnnnnnnnnnnnnnnnnnnnnnnnnnnnnnnnnnnnnnnnnnnnnnnnnnnnnnnnnnnnnnnnnnnnnnnnnnnnnnnnnnnnnnnnnnnnnnnnnnnnnnnnnnnnnnnnnnnnnnnnnnnnnnnnnnnnnnnnnnnnnnnnnnnnnnnnnnnnnnnnnnnnnnnnnnnnnnnnnnnnnnnnnnnnnnnnnnnnnnnnnnnnnnnnnnnnnnnnnnnnnnnnnnnnnnnnnnnnnnnnnnnnnnnnnnnnnnnnnnnnnnnnnnnnnnnnnnnnnnnnnnnnnnnnnnnnnnnnnnnnnnnnnnnnnnnnnnnnnnnnnnnnnnnnnnnnnnnnnnnnnnnnnnnnnnnnnnnnnnnnnnnnnnnnnnnnnnnnnnnnnnnnnnnnnnnnnnnnnnnnnnnnnnnnnnnnnnnnnnnnnnnnnnnnnnnnnnnnnnnnnnnnnnnnnnnnnnnnnnnnnnnnnnnnnnnnnnnnnnnnnnnnnnnnnnnnnnnnnnnnnnnnnnnnnnnnnnnnnnnnnnnnnnnnnnnnnnnnnnnnnnnnnnnnnnnnnnnnnnnnnnnnnnnnnnnnnnnnnnnnnnnnnnnnnnnnnnnnnnnnnnnnnnnnnnnnnnnnnnnnnnnnnnnnnnnnnnnnnnnnnnnnnnnnnnnnnnnnnnnnnnnnnnnnnnnnnnnnnnnnnnnnnnnnnnnnnnnnnnnnnnnnnnnnnnnnnnnnnnnnnnnnnnnnnnnnnnnnnnnnnnnnnnnnnnnnnnnnnnnnnnnnnnnnnnnnnnnnnnnnnnnnnnnnnnnnnnnnnnnnnnnnnnnnnnnnnnnnnnnnnnnnnnnnnnnnnnnnnnnnnnnnnnnnnnnnnnnnnnnnnnnnnnnnnnnnnnnnnnnnnnnnnnnnnnnnnnnnnnnnnnnnnnnnnnnnnnnnnnnnnnnnnnnnnnnnnnnnnnnnnnnnnnnnnnnnnnnnnnnnnnnnnnnnnnnnnnnnnnnnnnnnnnnnnnnnnnnnnnnnnnnnnnnnnnnnnnnnnnnnnnnnnnnnnnnnnnnnnnnnnnnnnnnnnnnnnnnnnnnnnnnnnnnnnnnnnnnnnnnnnnnnnnnnnnnnnnnnnnnnnnnnnnnnnnnnnnnnnnnnnnnnnnnnnnnnnnnnnnnnnnnnnnnnnnnnnnnnnnnnnnnnnnnnnnnnnnnnnnnnnnnnnnnnnnnnnnnnnnnnnnnnnnnnnnnnnnnnnnnnnnnnnnnnnnnnnnnnnnnnnnnnnnnnnnnnnnnnnnnnnnnnnnnnnnnnnnnnnnnnnnnnnnnnnnnnnnnnnnnnnnnnnnnnnnnnnnnnnnnnnnnnnnnnnnnnnnnnnnnnnnnnnnnnnnnnnnnnnnnnnnnnnnnnnnnnnnnnnnnnnnnnnnnnnnnnnnnnnnnnnnnnnnnnnnnnnnnnnnnnnnnnnnnnnnnnnnnnnnnnnnnnnnnnnnnnnnnnnnnnnnnnnnnnnnnnnnnnnnnnnnnnnnnnnnnnnnnnnnnnnnnnnnnnnnnnnnnnnnnnnnnnnnnnnnnnnnnnnnnnnnnnnnnnnnnnnnnnnnnnnnnnnnnnnnnnnnnnnnnnnnnnnnnnnnnnnnnnnnnnnnnnnnnnnnnnnnnnnnnnnnnnnnnnnnnnnnnnnnnnnnnnnnnnnnnnnnnnnnnnnnnnnnnnnnnnnnnnnnnnnnnnnnnnnnnnnnnnnnnnnnnnnnnnnnnnnnnnnnnnnnnnnnnnnnnnnnnnnnnnnnnnnnnnnnnnnnnnnnnnnnnnnnnnnnnnnnnnnnnnnnnnnnnnnnnnnnnnnnnnnnnnnnnnnnnnnnnnnnnnnnnnnnnnnnnnnnnnnnnnnnnnnnnnnnnnnnnnnnnnnnnnnnnnnnnnnnnnnnnnnnnnnnnnnnnnnnnnnnnnnnnnnnnnnnnnnnnnnnnnnnnnnnnnnnnnnnnnnnnnnnnnnnnnnnnnnnnnnnnnnnnnnnnnnnnnnnnnnnnnnnnnnnnnnnnnnnnnnnnnnnnnnnnnnnnnnnnnnnnnnnnnnnnnnnnnnnnnnnnnnnnnnnnnnnnnnnnnnnnnnnnnnnnnnnnnnnnnnnnnnnnnnnnnnnnnnnnnnnnnnnnnnnnnnnnnnnnnnnnnnnnnnnnnnnnnnnnnnnnnnnnnnnnnnnnnnnnnnnnnnnnnnnnnnnnnnnnnnnnnnnnnnnnnnnnnnnnnnnnnnnnnnnnnnnnnnnnnnnnnnnnnnnnnnnnnnnnnnnnnnnnnnnnnnnnnnnnnnnnnnnnnnnnnnnnnnnnnnnnnnnnnnnnnnnnnnnnnnnnnnnnnnnnnnnnnnnnnnnnnnnnnnnnnnnnnnnnnnnnnnnnnnnnnnnnnnnnnnnnnnnnnnnnnnnnnnnnnnnnnnnnnnnnnnnnnnnnnnnnnnnnnnnnnnnnnnnnnnnnnnnnnnnnnnnnnnnnnnnnnnnnnnnnnnnnnnnnnnnnnnnnnnnnnnnnnnnnnnnnnnnnnnnnnnnnnnnnnnnnnnnnnnnnnnnnnnnnnnnnnnnnnnnnnnnnnnnnnnnnnnnnnnnnnnnnnnnnnnnnnnnnnnnnnnnnnnnnnnnnnnnnnnnnnnnnnnnnnnnnnnnnnnnnnnnnnnnnnnnnnnnnnnnnnnnnnnnnnnnnnnnnnnnnnnnnnnnnnnnnnnnnnnnnnnnnnnnnnnnnnnnnnnnnnnnnnnnnnnnnnnnnnnnnnnnnnnnnnnnnnnnnnnnnnnnnnnnnnnnnnnnnnnnnnnnnnnnnnnnnnnnnnnnnnnnnnnnnnnnnnnnnnnnnnnnnnnnnnnnnnnnnnnnnnnnnnnnnnnnnnnnnnnnnnnnnnnnnnnnnnnnnnnnnnnnnnnnnnnnnnnnnnnnnnnnnnnnnnnnnnnnnnnnnnnnnnnnnnnnnnnnnnnnnnnnnnnnnnnnnnnnnnnnnnnnnnnnnnnnnnnnnnnnnnnnnnnnnnnnnnnnnnnnnnnnnnnnnnnnnnnnnnnnnnnnnnnnnnnnnnnnnnnnnnnnnnnnnnnnnnnnnnnnnnnnnnnnnnnnnnnnnnnnnnnnnnnnnnnnnnnnnnnnnnnnnnnnnnnnnnnnnnnnnnnnnnnnnnnnnnnnnnnnnnnnnnnnnnnnnnnnnnnnnnnnnnnnnnnnnnnnnnnnnnnnnnnnnnnnnnnnnnnnnnnnnnnnnnnnnnnnnnnnnnnnnnnnnnnnnnnnnnnnnnnnnnnnnnnnnnnnnnnnnnnnnnnnnnnnnnnnnnnnnnnnnnnnnnnnnnnnnnnnnnnnnnnnnnnnnnnnnnnnnnnnnnnnnnnnnnnnnnnnnnnnnnnnnnnnnnnnnnnnnnnnnnnnnnnnnnnnnnnnnnnnnnnnnnnnnnnnnnnnnnnnnnnnnnnnnnnnnnnnnnnnnnnnnnnnnnnnnnnnnnnnnnnnnnnnnnnnnnnnnnnnnnnnnnnnnnnnnnnnnnnnnnnnnnnnnnnnnnnnnnnnnnnnnnnnnnnnnnnnnnnnnnnnnnnnnnnnnnnnnnnnnnnnnnnnnnnnnnnnnnnnnnnnnnnnnnnnnnnnnnnnnnnnnnnnnnnnnnnnnnnnnnnnnnnnnnnnnnnnnnnnnnnnnnnnnnnnnnnnnnnnnnnnnnnnnnnnnnnnnnnnnnnnnnnnnnnnnnnnnnnnnnnnnnnnnnnnnnnnnnnnnnnnnnnnnnnnnnnnnnnnnnnnnnnnnnnnnnnnnnnnnnnnnnnnnnnnnnnnnnnnnnnnnnnnnnnnnnnnnnnnnnnnnnnnnnnnnnnnnnnnnnnnnnnnnnnnnnnnnnnnnnnnnnnnnnnnnnnnnnnnnnnnnnnnnnnnnnnnnnnnnnnnnnnnnnnnnnnnnnnnnnnnnnnnnnnnnnnnnnnnnnnnnnnnnnnnnnnnnnnnnnnnnnnnnnnnnnnnnnnnnnnnnnnnnnnnnnnnnnnnnnnnnnnnnnnnnnnnnnnnnnnnnnnnnnnnnnnnnnnnnnnnnnnnnnnnnnnnnnnnnnnnnnnnnnnnnnnnnnnnnnnnnnnnnnnnnnnnnnnnnnnnnnnnnnnnnnnnnnnnnnnnnnnnnnnnnnnnnnnnnnnnnnnnnnnnnnnnnnnnnnnnnnnnnnnnnnnnnnnnnnnnnnnnnnnnnnnnnnnnnnnnnnnnnnnnnnnnnnnnnnnnnnnnnnnnnnnnnnnnnnnnnnnnnnnnnnnnnnnnnnnnnnnnnnnnnnnnnnnnnnnnnnnnnnnnnnnnnnnnnnnnnnnnnnnnnnnnnnnnnnnnnnnnnnnnnnnnnnnnnnnnnnnnnnnnnnnnnnnnnnnnnnnnnnnnnnnnnnnnnnnnnnnnnnnnnnnnnnnnnnnnnnnnnnnnnnnnnnnnnnnnnnnnnnnnnnnnnnnnnnnnnnnnnnnnnnnnnnnnnnnnnnnnnnnnnnnnnnnnnnnnnnnnnnnnnnnnnnnnnnnnnnnnnnnnnnnnnnnnnnnnnnnnnnnnnnnnnnnnnnnnnnnnnnnnnnnnnnnnnnnnnnnnnnnnnnnnnnnnnnnnnnnnnnnnnnnnnnnnnnnnnnnnnnnnnnnnnnnnnnnnnnnnnnnnnnnnnnnnnnnnnnnnnnnnnnnnnnnnnnnnnnnnnnnnnnnnnnnnnnnnnnnnnnnnnnnnnnnnnnnnnnnnnnnnnnnnnnnnnnnnnnnnnnnnnnnnnnnnnnnnnnnnnnnnnnnnnnnnnnnnnnnnnnnnnnnnnnnnnnnnnnnnnnnnnnnnnnnnnnnnnnnnnnnnnnnnnnnnnnnnnnnnnnnnnnnnnnnnnnnnnnnnnnnnnnnnnnnnnnnnnnnnnnnnnnnnnnnnnnnnnnnnnnnnnnnnnnnnnnnnnnnnnnnnnnnnnnnnnnnnnnnnnnnnnnnnnnnnnnnnnnnnnnnnnnnnnnnnnnnnnnnnnnnnnnnnnnnnnnnnnnnnnnnnnnnnnnnnnnnnnnnnnnnnnnnnnnnnnnnnnnnnnnnnnnnnnnnnnnnnnnnnnnnnnnnnnnnnnnnnnnnnnnnnnnnnnnnnnnnnnnnnnnnnnnnnnnnnnnnnnnnnnnnnnnnnnnnnnnnnnnnnnnnnnnnnnnnnnnnnnnnnnnnnnnnnnnnnnnnnnnnnnnnnnnnnnnnnnnnnnnnnnnnnnnnnnnnnnnnnnnnnnnnnnnnnnnnnnnnnnnnnnnnnnnnnnnnnnnnnnnnnnnnnnnnnnnnnnnnnnnnnnnnnnnnnnnnnnnnnnnnnnnnnnnnnnnnnnnnnnnnnnnnnnnnnnnnnnnnnnnnnnnnnnnnnnnnnnnnnnnnnnnnnnnnnnnnnnnnnnnnnnnnnnnnnnnnnnnnnnnnnnnnnnnnnnnnnnnnnnnnnnnnnnnnnnnnnnnnnnnnnnnnnnnnnnnnnnnnnnnnnnnnnnnnnnnnnnnnnnnnnnnnnnnnnnnnnnnnnnnnnnnnnnnnnnnnnnnnnnnnnnnnnnnnnnnnnnnnnnnnnnnnnnnnnnnnnnnnnnnnnnnnnnnnnnnnnnnnnnnnnnnnnnnnnnnnnnnnnnnnnnnnnnnnnnnnnnnnnnnnnnnnnnnnnnnnnnnnnnnnnnnnnnnnnnnnnnnnnnnnnnnnnnnnnnnnnnnnnnnnnnnnnnnnnnnnnnnnnnnnnnnnnnnnnnnnnnnnnnnnnnnnnnnnnnnnnnnnnnnnnnnnnnnnnnnnnnnnnnnnnnnnnnnnnnnnnnnnnnnnnnnnnnnnnnnnnnnnnnnnnnnnnnnnnnnnnnnnnnnnnnnnnnnnnnnnnnnnnnnnnnnnnnnnnnnnnnnnnnnnnnnnnnnnnnnnnnnnnnnnnnnnnnnnnnnnnnnnnnnnnnnnnnnnnnnnnnnnnnnnnnnnnnnnnnnnnnnnnnnnnnnnnnnnnnnnnnnnnnnnnnnnnnnnnnnnnnnnnnnnnnnnnnnnnnnnnnnnnnnnnnnnnnnnnnnnnnnnnnnnnnnnnnnnnnnnnnnnnnnnnnnnnnnnnnnnnnnnnnnnnnnnnnnnnnnnnnnnnnnnnnnnnnnnnnnnnnnnnnnnnnnnnnnnnnnnnnnnnnnnnnnnnnnnnnnnnnnnnnnnnnnnnnnnnnnnnnnnnnnnnnnnnnnnnnnnnnnnnnnnnnnnnnnnnnnnnnnnnnnnnnnnnnnnnnnnnnnnnnnnnnnnnnnnnnnnnnnnnnnnnnnnnnnnnnnnnnnnnnnnnnnnnnnnnnnnnnnnnnnnnnnnnnnnnnnnnnnnnnnnnnnnnnnnnnnnnnnnnnnnnnnnnnnnnnnnnnnnnnnnnnnnnnnnnnnnnnnnnnnnnnnnnnnnnnnnnnnnnnnnnnnnnnnnnnnnnnnnnnnnnnnnnnnnnnnnnnnnnnnnnnnnnnnnnnnnnnnnnnnnnnnnnnnnnnnnnnnnnnnnnnnnnnnnnnnnnnnnnnnnnnnnnnnnnnnnnnnnnnnnnnnnnnnnnnnnnnnnnnnnnnnnnnnnnnnnnnnnnnnnnnnnnnnnnnnnnnnnnnnnnnnnnnnnnnnnnnnnnnnnnnnnnnnnnnnnnnnnnnnnnnnnnnnnnnnnnnnnnnnnnnnnnnnnnnnnnnnnnnnnnnnnnnnnnnnnnnnnnnnnnnnnnnnnnnnnnnnnnnnnnnnnnnnnnnnnnnnnnnnnnnnnnnnnnnnnnnnnnnnnnnnnnnnnnnnnnnnnnnnnnnnnnnnnnnnnnnnnnnnnnnnnnnnnnnnnnnnnnnnnnnnnnnnnnnnnnnnnnnnnnnnnnnnnnnnnnnnnnnnnnnnnnnnnnnnnnnnnnnnnnnnnnnnnnnnnnnnnnnnnnnnnnnnnnnnnnnnnnnnnnnnnnnnnnnnnnnnnnnnnnnnnnnnnnnnnnnnnnnnnnnnnnnnnnnnnnnnnnnnnnnnnnnnnnnnnnnnnnnnnnnnnnnnnnnnnnnnnnnnnnnnnnnnnnnnnnnnnnnnnnnnnnnnnnnnnnnnnnnnnnnnnnnnnnnnnnnnnnnnnnnnnnnnnnnnnnnnnnnnnnnnnnnnnnnnnnnnnnnnnnnnnnnnnnnnnnnnnnnnnnnnnnnnnnnnnnnnnnnnnnnnnnnnnnnnnnnnnnnnnnnnnnnnnnnnnnnnnnnnnnnnnnnnnnnnnnnnnnnnnnnnnnnnnnnnnnnnnnnnnnnnnnnnnnnnnnnnnnnnnnnnnnnnnnnnnnnnnnnnnnnnnnnnnnnnnnnnnnnnnnnnnnnnnnnnnnnnnnnnnnnnnnnnnnnnnnnnnnnnnnnnnnnnnnnnnnnnnnnnnnnnnnnnnnnnnnnnnnnnnnnnnnnnnnnnnnnnnnnnnnnnnnnnnnnnnnnnnnnnnnnnnnnnnnnnnnnnnnnnnnnnnnnnnnnnnnnnnnnnnnnnnnnnnnnnnnnnnnnnnnnnnnnnnnnnnnnnnnnnnnnnnnnnnnnnnnnnnnnnnnnnnnnnnnnnnnnnnnnnnnnnnnnnnnnnnnnnnnnnnnnnnnnnnnnnnnnnnnnnnnnnnnnnnnnnnnnnnnnnnnnnnnnnnnnnnnnnnnnnnnnnnnnnnnnnnnnnnnnnnnnnnnnnnnnnnnnnnnnnnnnnnnnnnnnnnnnnnnnnnnnnnnnnnnnnnnnnnnnnnnnnnnnnnnnnnnnnnnnnnnnnnnnnnnnnnnnnnnnnnnnnnnnnnnnnnnnnnnnnnnnnnnnnnnnnnnnnnnnnnnnnnnnnnnnnnnnnnnnnnnnnnnnnnnnnnnnnnnnnnnnnnnnnnnnnnnnnnnnnnnnnnnnnnnnnnnnnnnnnnnnnnnnnnnnnnnnnnnnnnnnnnnnnnnnnnnnnnnnnnnnnnnnnnnnnnnnnnnnnnnnnnnnnnnnnnnnnnnnnnnnnnnnnnnnnnnnnnnnnnnnnnnnnnnnnnnnnnnnnnnnnnnnnnnnnnnnnnnnnnnnnnnnnnnnnnnnnnnnnnnnnnnnnnnnnnnnnnnnnnnnnnnnnnnnnnnnnnnnnnnnnnnnnnnnnnnnnnnnnnnnnnnnnnnnnnnnnnnnnnnnnnnnnnnnnnnnnnnnnnnnnnnnnnnnnnnnnnnnnnnnnnnnnnnnnnnnnnnnnnnnnnnnnnnnnnnnnnnnnnnnnnnnnnnnnnnnnnnnnnnnnnnnnnnnnnnnnnnnnnnnnnnnnnnnnnnnnnnnnnnnnnnnnnnnnnnnnnnnnnnnnnnnnnnnnnnnnnnnnnnnnnnnnnnnnnnnnnnnnnnnnnnnnnnnnnnnnnnnnnnnnnnnnnnnnnnnnnnnnnnnnnnnnnnnnnnnnnnnnnnnnnnnnnnnnnnnnnnnnnnnnnnnnnnnnnnnnnnnnnnnnnnnnnnnnnnnnnnnnnnnnnnnnnnnnnnnnnnnnnnnnnnnnnnnnnnnnnnnnnnnnnnnnnnnnnnnnnnnnnnnnnnnnnnnnnnnnnnnnnnnnnnnnnnnnnnnnnnnnnnnnnnnnnnnnnnnnnnnnnnnnnnnnnnnnnnnnnnnnnnnnnnnnnnnnnnnnnnnnnnnnnnnnnnnnnnnnnnnnnnnnnnnnnnnnnnnnnnnnnnnnnnnnnnnnnnnnnnnnnnnnnnnnnnnnnnnnnnnnnnnnnnnnnnnnnnnnnnnnnnnnnnnnnnnnnnnnnnnnnnnnnnnnnnnnnnnnnnnnnnnnnnnnnnnnnnnnnnnnnnnnnnnnnnnnnnnnnnnnnnnnnnnnnnnnnnnnnnnnnnnnnnnnnnnnnnnnnnnnnnnnnnnnnnnnnnnnnnnnnnnnnnnnnnnnnnnnnnnnnnnnnnnnnnnnnnnnnnnnnnnnnnnnnnnnnnnnnnnnnnnnnnnnnnnnnnnnnnnnnnnnnnnnnnnnnnnnnnnnnnnnnnnnnnnnnnnnnnnnnnnnnnnnnnnnnnnnnnnnnnnnnnnnnnnnnnnnnnnnnnnnnnnnnnnnnnnnnnnnnnnnnnnnnnnnnnnnnnnnnnnnnnnnnnnnnnnnnnnnnnnnnnnnnnnnnnnnnnnnnnnnnnnnnnnnnnnnnnnnnnnnnnnnnnnnnnnnnnnnnnnnnnnnnnnnnnnnnnnnnnnnnnnnnnnnnnnnnnnnnnnnnnnnnnnnnnnnnnnnnnnnnnnnnnnnnnnnnnnnnnnnnnnnnnnnnnnnnnnnnnnnnnnnnnnnnnnnnnnnnnnnnnnnnnnnnnnnnnnnnnnnnnnnnnnnnnnnnnnnnnnnnnnnnnnnnnnnnnnnnnnnnnnnnnnnnnnnnnnnnnnnnnnnnnnnnnnnnnnnnnnnnnnnnnnnnnnnnnnnnnnnnnnnnnnnnnnnnnnnnnnnnnnnnnnnnnnnnnnnnnnnnnnnnnnnnnnnnnnnnnnnnnnnnnnnnnnnnnnnnnnnnnnnnnnnnnnnnnnnnnnnnnnnnnnnnnnnnnnnnnnnnnnnnnnnnnnnnnnnnnnnnnnnnnnnnnnnnnnnnnnnnnnnnnnnnnnnnnnnnnnnnnnnnnnnnnnnnnnnnnnnnnnnnnnnnnnnnnnnnnnnnnnnnnnnnnnnnnnnnnnnnnnnnnnnnnnnnnnnnnnnnnnnnnnnnnnnnnnnnnnnnnnnnnnnnnnnnnnnnnnnnnnnnnnnnnnnnnnnnnnnnnnnnnnnnnnnnnnnnnnnnnnnnnnnnnnnnnnnnnnnnnnnnnnnnnnnnnnnnnnnnnnnnnnnnnnnnnnnnnnnnnnnnnnnnnnnnnnnnnnnnnnnnnnnnnnnnnnnnnnnnnnnnnnnnnnnnnnnnnnnnnnnnnnnnnnnnnnnnnnnnnnnnnnnnnnnnnnnnnnnnnnnnnnnnnnnnnnnnnnnnnnnnnnnnnnnnnnnnnnnnnnnnnnnnnnnnnnnnnnnnnnnnnnnnnnnnnnnnnnnnnnnnnnnnnnnnnnnnnnnnnnnnnnnnnnnnnnnnnnnnnnnnnnnnnnnnnnnnnnnnnnnnnnnnnnnnnnnnnnnnnnnnnnnnnnnnnnnnnnnnnnnnnnnnnnnnnnnnnnnnnnnnnnnnnnnnnnnnnnnnnnnnnnnnnnnnnnnnnnnnnnnnnnnnnnnnnnnnnnnnnnnnnnnnnnnnnnnnnnnnnnnnnnnnnnnnnnnnnnnnnnnnnnnnnnnnnnnnnnnnnnnnnnnnnnnnnnnnnnnnnnnnnnnnnnnnnnnnnnnnnnnnnnnnnnnnnnnnnnnnnnnnnnnnnnnnnnnnnnnnnnnnnnnnnnnnnnnnnnnnnnnnnnnnnnnnnnnnnnnnnnnnnnnnnnnnnnnnnnnnnnnnnnnnnnnnnnnnnnnnnnnnnnnnnnnnnnnnnnnnnnnnnnnnnnnnnnnnnnnnnnnnnnnnnnnnnnnnnnnnnnnnnnnnnnnnnnnnnnnnnnnnnnnnnnnnnnnnnnnnnnnnnnnnnnnnnnnnnnnnnnnnnnnnnnnnnnnnnnnnnnnnnnnnnnnnnnnnnnnnnnnnnnnnnnnnnnnnnnnnnnnnnnnnnnnnnnnnnnnnnnnnnnnnnnnnnnnnnnnnnnnnnnnnnnnnnnnnnnnnnnnnnnnnnnnnnnnnnnnnnnnnnnnnnnnnnnnnnnnnnnnnnnnnnnnnnnnnnnnnnnnnnnnnnnnnnnnnnnnnnnnnnnnnnnnnnnnnnnnnnnnnnnnnnnnnnnnnnnnnnnnnnnnnnnnnnnnnnnnnnnnnnnnnnnnnnnnnnnnnnnnnnnnnnnnnnnnnnnnnnnnnnnnnnnnnnnnnnnnnnnnnnnnnnnnnnnnnnnnnnnnnnnnnnnnnnnnnnnnnnnnnnnnnnnnnnnnnnnnnnnnnnnnnnnnnnnnnnnnnnnnnnnnnnnnnnnnnnnnnnnnnnnnnnnnnnnnnnnnnnnnnnnnnnnnnnnnnnnnnnnnnnnnnnnnnnnnnnnnnnnnnnnnnnnnnnnnnnnnnnnnnnnnnnnnnnnnnnnnnnnnnnnnnnnnnnnnnnnnnnnnnnnnnnnnnnnnnnnnnnnnnnnnnnnnnnnnnnnnnnnnnnnnnnnnnnnnnnnnnnnnnnnnnnnnnnnnnnnnnnnnnnnnnnnnnnnnnnnnnnnnnnnnnnnnnnnnnnnnnnnnnnnnnnnnnnnnnnnnnnnnnnnnnnnnnnnnnnnnnnnnnnnnnnnnnnnnnnnnnnnnnnnnnnnnnnnnnnnnnnnnnnnnnnnnnnnnnnnnnnnnnnnnnnnnnnnnnnnnnnnnnnnnnnnnnnnnnnnnnnnnnnnnnnnnnnnnnnnnnnnnnnnnnnnnnnnnnnnnnnnnnnnnnnnnnnnnnnnnnnnnnnnnnnnnnnnnnnnnnnnnnnnnnnnnnnnnnnnnnnnnnnnnnnnnnnnnnnnnnnnnnnnnnnnnnnnnnnnnnnnnnnnnnnnnnnnnnnnnnnnnnnnnnnnnnnnnnnnnnnnnnnnnnnnnnnnnnnnnnnnnnnnnnnnnnnnnnnnnnnnnnnnnnnnnnnnnnnnnnnnnnnnnnnnnnnnnnnnnnnnnnnnnnnnnnnnnnnnnnnnnnnnnnnnnnnnnnnnnnnnnnnnnnnnnnnnnnnnnnnnnnnnnnnnnnnnnnnnnnnnnnnnnnnnnnnnnnnnnnnnnnnnnnnnnnnnnnnnnnnnnnnnnnnnnnnnnnnnnnnnnnnnnnnnnnnnnnnnnnnnnnnnnnnnnnnnnnnnnnnnnnnnnnnnnnnnnnnnnnnnnnnnnnnnnnnnnnnnnnnnnnnnnnnnnnnnnnnnnnnnnnnnnnnnnnnnnnnnnnnnnnnnnnnnnnnnnnnnnnnnnnnnnnnnnnnnnnnnnnnnnnnnnnnnnnnnnnnnnnnnnnnnnnnnnnnnnnnnnnnnnnnnnnnnnnnnnnnnnnnnnnnnnnnnnnnnnnnnnnnnnnnnnnnnnnnnnnnnnnnnnnnnnnnnnnnnnnnnnnnnnnnnnnnnnnnnnnnnnnnnnnnnnnnnnnnnnnnnnnnnnnnnnnnnnnnnnnnnnnnnnnnnnnnnnnnnnnnnnnnnnnnnnnnnnnnnnnnnnnnnnnnnnnnnnnnnnnnnnnnnnnnnnnnnnnnnnnnnnnnnnnnnnnnnnnnnnnnnnnnnnnnnnnnnnnnnnnnnnnnnnnnnnnnnnnnnnnnnnnnnnnnnnnnnnnnnnnnnnnnnnnnnnnnnnnnnnnnnnnnnnnnnnnnnnnnnnnnnnnnnnnnnnnnnnnnnnnnnnnnnnnnnnnnnnnnnnnnnnnnnnnnnnnnnnnnnnnnnnnnnnnnnnnnnnnnnnnnnnnnnnnnnnnnnnnnnnnnnnnnnnnnnnnnnnnnnnnnnnnnnnnnnnnnnnnnnnnnnnnnnnnnnnnnnnnnnnnnnnnnnnnnnnnnnnnnnnnnnnnnnnnnnnnnnnnnnnnnnnnnnnnnnnnnnnnnnnnnnnnnnnnnnnnnnnnnnnnnnnnnnnnnnnnnnnnnnnnnnnnnnnnnnnnnnnnnnnnnnnnnnnnnnnnnnnnnnnnnnnnnnnnnnnnnnnnnnnnnnnnnnnnnnnnnnnnnnnnnnnnnnnnnnnnnnnnnnnnnnnnnnnnnnnnnnnnnnnnnnnnnnnnnnnnnnnnnnnnnnnnnnnnnnnnnnnnnnnnnnnnnnnnnnnnnnnnnnnnnnnnnnnnnnnnnnnnnnnnnnnnnnnnnnnnnnnnnnnnnnnnnnnnnnnnnnnnnnnnnnnnnnnnnnnnnnnnnnnnnnnnnnnnnnnnnnnnnnnnnnnnnnnnnnnnnnnnnnnnnnnnnnnnnnnnnnnnnnnnnnnnnnnnnnnnnnnnnnnnnnnnnnnnnnnnnnnnnnnnnnnnnnnnnnnnnnnnnnnnnnnnnnnnnnnnnnnnnnnnnnnnnnnnnnnnnnnnnnnnnnnnnnnnnnnnnnnnnnnnnnnnnnnnnnnnnnnnnnnnnnnnnnnnnnnnnnnnnnnnnnnnnnnnnnnnnnnnnnnnnnnnnnnnnnnnnnnnnnnnnnnnnnnnnnnnnnnnnnnnnnnnnnnnnnnnnnnnnnnnnnnnnnnnnnnnnnnnnnnnnnnnnnnnnnnnnnnnnnnnnnnnnnnnnnnnnnnnnnnnnnnnnnnnnnnnnnnnnnnnnnnnnnnnnnnnnnnnnnnnnnnnnnnnnnnnnnnnnnnnnnnnnnnnnnnnnnnnnnnnnnnnnnnnnnnnnnnnnnnnnnnnnnnnnnnnnnnnnnnnnnnnnnnnnnnnnnnnnnnnnnnnnnnnnnnnnnnnnnnnnnnnnnnnnnnnnnnnnnnnnnnnnnnnnnnnnnnnnnnnnnnnnnnnnnnnnnnnnnnnnnnnnnnnnnnnnnnnnnnnnnnnnnnnnnnnnnnnnnnnnnnnnnnnnnnnnnnnnnnnnnnnnnnnnnnnnnnnnnnnnnnnnnnnnnnnnnnnnnnnnnnnnnnnnnnnnnnnnnnnnnnnnnnnnnnnnnnnnnnnnnnnnnnnnnnnnnnnnnnnnnnnnnnnnnnnnnnnnnnnnnnnnnnnnnnnnnnnnnnnnnnnnnnnnnnnnnnnnnnnnnnnnnnnnnnnnnnnnnnnnnnnnnnnnnnnnnnnnnnnnnnnnnnnnnnnnnnnnnnnnnnnnnnnnnnnnnnnnnnnnnnnnnnnnnnnnnnnnnnnnnnnnnnnnnnnnnnnnnnnnnnnnnnnnnnnnnnnnnnnnnnnnnnnnnnnnnnnnnnnnnnnnnnnnnnnnnnnnnnnnnnnnnnnnnnnnnnnnnnnnnnnnnnnnnnnnnnnnnnnnnnnnnnnnnnnnnnnnnnnnnnnnnnnnnnnnnnnnnnnnnnnnnnnnnnnnnnnnnnnnnnnnnnnnnnnnnnnnnnnnnnnnnnnnnnnnnnnnnnnnnnnnnnnnnnnnnnnnnnnnnnnnnnnnnnnnnnnnnnnnnnnnnnnnnnnnnnnnnnnnnnnnnnnnnnnnnnnnnnnnnnnnnnnnnnnnnnnnnnnnnnnnnnnnnnnnnnnnnnnnnnnnnnnnnnnnnnnnnnnnnnnnnnnnnnnnnnnnnnnnnnnnnnnnnnnnnnnnnnnnnnnnnnnnnnnnnnnnnnnnnnnnnnnnnnnnnnnnnnnnnnnnnnnnnnnnnnnnnnnnnnnnnnnnnnnnnnnnnnnnnnnnnnnnnnnnnnnnnnnnnnnnnnnnnnnnnnnnnnnnnnnnnnnnnnnnnnnnnnnnnnnnnnnnnnnnnnnnnnnnnnnnnnnnnnnnnnnnnnnnnnnnnnnnnnnnnnnnnnnnnnnnnnnnnnnnnnnnnnnnnnnnnnnnnnnnnnnnnnnnnnnnnnnnnnnnnnnnnnnnnnnnnnnnnnnnnnnnnnnnnnnnnnnnnnnnnnnnnnnnnnnnnnnnnnnnnnnnnnnnnnnnnnnnnnnnnnnnnnnnnnnnnnnnnnnnnnnnnnnnnnnnnnnnnnnnnnnnnnnnnnnnnnnnnnnnnnnnnnnnnnnnnnnnnnnnnnnnnnnnnnnnnnnnnnnnnnnnnnnnnnnnnnnnnnnnnnnnnnnnnnnnnnnnnnnnnnnnnnnnnnnnnnnnnnnnnnnnnnnnnnnnnnnnnnnnnnnnnnnnnnnnnnnnnnnnnnnnnnnnnnnnnnnnnnnnnnnnnnnnnnnnnnnnnnnnnnnnnnnnnnnnnnnnnnnnnnnnnnnnnnnnnnnnnnnnnnnnnnnnnnnnnnnnnnnnnnnnnnnnnnnnnnnnnnnnnnnnnnnnnnnnnnnnnnnnnnnnnnnnnnnnnnnnnnnnnnnnnnnnnnnnnnnnnnnnnnnnnnnnnnnnnnnnnnnnnnnnnnnnnnnnnnnnnnnnnnnnnnnnnnnnnnnnnnnnnnnnnnnnnnnnnnnnnnnnnnnnnnnnnnnnnnnnnnnnnnnnnnnnnnnnnnnnnnnnnnnnnnnnnnnnnnnnnnnnnnnnnnnnnnnnnnnnnnnnnnnnnnnnnnnnnnnnnnnnnnnnnnnnnnnnnnnnnnnnnnnnnnnnnnnnnnnnnnnnnnnnnnnnnnnnnnnnnnnnnnnnnnnnnnnnnnnnnnnnnnnnnnnnnnnnnnnnnnnnnnnnnnnnnnnnnnnnnnnnnnnnnnnnnnnnnnnnnnnnnnnnnnnnnnnnnnnnnnnnnnnnnnnnnnnnnnnnnnnnnnnnnnnnnnnnnnnnnnnnnnnnnnnnnnnnnnnnnnnnnnnnnnnnnnnnnnnnnnnnnnnnnnnnnnnnnnnnnnnnnnnnnnnnnnnnnnnnnnnnnnnnnnnnnnnnnnnnnnnnnnnnnnnnnnnnnnnnnnnnnnnnnnnnnnnnnnnnnnnnnnnnnnnnnnnnnnnnnnnnnnnnnnnnnnnnnnnnnnnnnnnnnnnnnnnnnnnnnnnnnnnnnnnnnnnnnnnnnnnnnnnnnnnnnnnnnnnnnnnnnnnnnnnnnnnnnnnnnnnnnnnnnnnnnnnnnnnnnnnnnnnnnnnnnnnnnnnnnnnnnnnnnnnnnnnnnnnnnnnnnnnnnnnnnnnnnnnnnnnnnnnnnnnnnnnnnnnnnnnnnnnnnnnnnnnnnnnnnnnnnnnnnnnnnnnnnnnnnnnnnnnnnnnnnnnnnnnnnnnnnnnnnnnnnnnnnnnnnnnnnnnnnnnnnnnnnnnnnnnnnnnnnnnnnnnnnnnnnnnnnnnnnnnnnnnnnnnnnnnnnnnnnnnnnnnnnnnnnnnnnnnnnnnnnnnnnnnnnnnnnnnnnnnnnnnnnnnnnnnnnnnnnnnnnnnnnnnnnnnnnnnnnnnnnnnnnnnnnnnnnnnnnnnnnnnnnnnnnnnnnnnnnnnnnnnnnnnnnnnnnnnnnnnnnnnnnnnnnnnnnnnnnnnnnnnnnnnnnnnnnnnnnnnnnnnnnnnnnnnnnnnnnnnnnnnnnnnnnnnnnnnnnnnnnnnnnnnnnnnnnnnnnnnnnnnnnnnnnnnnnnnnnnnnnnnnnnnnnnnnnnnnnnnnnnnnnnnnnnnnnnnnnnnnnnnnnnnnnnnnnnnnnnnnnnnnnnnnnnnnnnnnnnnnnnnnnnnnnnnnnnnnnnnnnnnnnnnnnnnnnnnnnnnnnnnnnnnnnnnnnnnnnnnnnnnnnnnnnnnnnnnnnnnnnnnnnnnnnnnnnnnnnnnnnnnnnnnnnnnnnnnnnnnnnnnnnnnnnnnnnnnnnnnnnnnnnnnnnnnnnnnnnnnnnnnnnnnnnnnnnnnnnnnnnnnnnnnnnnnnnnnnnnnnnnnnnnnnnnnnnnnnnnnnnnnnnnnnnnnnnnnnnnnnnnnnnnnnnnnnnnnnnnnnnnnnnnnnnnnnnnnnnnnnnnnnnnnnnnnnnnnnnnnnnnnnnnnnnnnnnnnnnnnnnnnnnnnnnnnnnnnnnnnnnnnnnnnnnnnnnnnnnnnnnnnnnnnnnnnnnnnnnnnnnnnnnnnnnnnnnnnnnnnnnnnnnnnnnnnnnnnnnnnnnnnnnnnnnnnnnnnnnnnnnnnnnnnnnnnnnnnnnnnnnnnnnnnnnnnnnnnnnnnnnnnnnnnnnnnnnnnnnnnnnnnnnnnnnnnnnnnnnnnnnnnnnnnnnnnnnnnnnnnnnnnnnnnnnnnnnnnnnnnnnnnnnnnnnnnnnnnnnnnnnnnnnnnnnnnnnnnnnnnnnnnnnnnnnnnnnnnnnnnnnnnnnnnnnnnnnnnnnnnnnnnnnnnnnnnnnnnnnnnnnnnnnnnnnnnnnnnnnnnnnnnnnnnnnnnnnnnnnnnnnnnnnnnnnnnnnnnnnnnnnnnnnnnnnnnnnnnnnnnnnnnnnnnnnnnnnnnnnnnnnnnnnnnnnnnnnnnnnnnnnnnnnnnnnnnnnnnnnnnnnnnnnnnnnnnnnnnnnnnnnnnnnnnnnnnnnnnnnnnnnnnnnnnnnnnnnnnnnnnnnnnnnnnnnnnnnnnnnnnnnnnnnnnnnnnnnnnnnnnnnnnnnnnnnnnnnnnnnnnnnnnnnnnnnnnnnnnnnnnnnnnnnnnnnnnnnnnnnnnnnnnnnnnnnnnnnnnnnnnnnnnnnnnnnnnnnnnnnnnnnnnnnnnnnnnnnnnnnnnnnnnnnnnnnnnnnnnnnnnnnnnnnnnnnnnnnnnnnnnnnnnnnnnnnnnnnnnnnnnnnnnnnnnnnnnnnnnnnnnnnnnnnnnnnnnnnnnnnnnnnnnnnnnnnnnnnnnnnnnnnnnnnnnnnnnnnnnnnnnnnnnnnnnnnnnnnnnnnnnnnnnnnnnnnnnnnnnnnnnnnnnnnnnnnnnnnnnnnnnnnnnnnnnnnnnnnnnnnnnnnnnnnnnnnnnnnnnnnnnnnnnnnnnnnnnnnnnnnnnnnnnnnnnnnnnnnnnnnnnnnnnnnnnnnnnnnnnnnnnnnnnnnnnnnnnnnnnnnnnnnnnnnnnnnnnnnnnnnnnnnnnnnnnnnnnnnnnnnnnnnnnnnnnnnnnnnnnnnnnnnnnnnnnnnnnnnnnnnnnnnnnnnnnnnnnnnnnnnnnnnnnnnnnnnnnnnnnnnnnnnnnnnnnnnnnnnnnnnnnnnnnnnnnnnnnnnnnnnnnnnnnnnnnnnnnnnnnnnnnnnnnnnnnnnnnnnnnnnnnnnnnnnnnnnnnnnnnnnnnnnnnnnnnnnnnnnnnnnnnnnnnnnnnnnnnnnnnnnnnnnnnnnnnnnnnnnnnnnnnnnnnnnnnnnnnnnnnnnnnnnnnnnnnnnnnnnnnnnnnnnnnnnnnnnnnnnnnnnnnnnnnnnnnnnnnnnnnnnnnnnnnnnnnnnnnnnnnnnnnnnnnnnnnnnnnnnnnnnnnnnnnnnnnnnnnnnnnnnnnnnnnnnnnnnnnnnnnnnnnnnnnnnnnnnnnnnnnnnnnnnnnnnnnnnnnnnnnnnnnnnnnnnnnnnnnnnnnnnnnnnnnnnnnnnnnnnnnnnnnnnnnnnnnnnnnnnnnnnnnnnnnnnnnnnnnnnnnnnnnnnnnnnnnnnnnnnnnnnnnnnnnnnnnnnnnnnnnnnnnnnnnnnnnnnnnnnnnnnnnnnnnnnnnnnnnnnnnnnnnnnnnnnnnnnnnnnnnnnnnnnnnnnnnnnnnnnnnnnnnnnnnnnnnnnnnnnnnnnnnnnnnnnnnnnnnnnnnnnnnnnnnnnnnnnnnnnnnnnnnnnnnnnnnnnnnnnnnnnnnnnnnnnnnnnnnnnnnnnnnnnnnnnnnnnnnnnnnnnnnnnnnnnnnnnnnnnnnnnnnnnnnnnnnnnnnnnnnnnnnnnnnnnnnnnnnnnnnnnnnnnnnnnnnnnnnnnnnnnnnnnnnnnnnnnnnnnnnnnnnnnnnnnnnnnnnnnnnnnnnnnnnnnnnnnnnnnnnnnnnnnnnnnnnnnnnnnnnnnnnnnnnnnnnnnnnnnnnnnnnnnnnnnnnnnnnnnnnnnnnnnnnnnnnnnnnnnnnnnnnnnnnnnnnnnnnnnnnnnnnnnnnnnnnnnnnnnnnnnnnnnnnnnnnnnnnnnnnnnnnnnnnnnnnnnnnnnnnnnnnnnnnnnnnnnnnnnnnnnnnnnnnnnnnnnnnnnnnnnnnnnnnnnnnnnnnnnnnnnnnnnnnnnnnnnnnnnnnnnnnnnnnnnnnnnnnnnnnnnnnnnnnnnnnnnnnnnnnnnnnnnnnnnnnnnnnnnnnnnnnnnnnnnnnnnnnnnnnnnnnnnnnnnnnnnnnnnnnnnnnnnnnnnnnnnnnnnnnnnnnnnnnnnnnnnnnnnnnnnnnnnnnnnnnnnnnnnnnnnnnnnnnnnnnnnnnnnnnnnnnnnnnnnnnnnnnnnnnnnnnnnnnnnnnnnnnnnnnnnnnnnnnnnnnnnnnnnnnnnnnnnnnnnnnnnnnnnnnnnnnnnnnnnnnnnnnnnnnnnnnnnnnnnnnnnnnnnnnnnnnnnnnnnnnnnnnnnnnnnnnnnnnnnnnnnnnnnnnnnnnnnnnnnnnnnnnnnnnnnnnnnnnnnnnnnnnnnnnnnnnnnnnnnnnnnnnnnnnnnnnnnnnnnnnnnnnnnnnnnnnnnnnnnnnnnnnnnnnnnnnnnnnnnnnnnnnnnnnnnnnnnnnnnnnnnnnnnnnnnnnnnnnnnnnnnnnnnnnnnnnnnnnnnnnnnnnnnnnnnnnnnnnnnnnnnnnnnnnnnnnnnnnnnnnnnnnnnnnnnnnnnnnnnnnnnnnnnnnnnnnnnnnnnnnnnnnnnnnnnnnnnnnnnnnnnnnnnnnnnnnnnnnnnnnnnnnnnnnnnnnnnnnnnnnnnnnnnnnnnnnnnnnnnnnnnnnnnnnnnnnnnnnnnnnnnnnnnnnnnnnnnnnnnnnnnnnnnnnnnnnnnnnnnnnnnnnnnnnnnnnnnnnnnnnnnnnnnnnnnnnnnnnnnnnnnnnnnnnnnnnnnnnnnnnnnnnnnnnnnnnnnnnnnnnnnnnnnnnnnnnnnnnnnnnnnnnnnnnnnnnnnnnnnnnnnnnnnnnnnnnnnnnnnnnnnnnnnnnnnnnnnnnnnnnnnnnnnnnnnnnnnnnnnnnnnnnnnnnnnnnnnnnnnnnnnnnnnnnnnnnnnnnnnnnnnnnnnnnnnnnnnnnnnnnnnnnnnnnnnnnnnnnnnnnnnnnnnnnnnnnnnnnnnnnnnnnnnnnnnnnnnnnnnnnnnnnnnnnnnnnnnnnnnnnnnnnnnnnnnnnnnnnnnnnnnnnnnnnnnnnnnnnnnnnnnnnnnnnnnnnnnnnnnnnnnnnnnnnnnnnnnnnnnnnnnnnnnnnnnnnnnnnnnnnnnnnnnnnnnnnnnnnnnnnnnnnnnnnnnnnnnnnnnnnnnnnnnnnnnnnnnnnnnnnnnnnnnnnnnnnnnnnnnnnnnnnnnnnnnnnnnnnnnnnnnnnnnnnnnnnnnnnnnnnnnnnnnnnnnnnnnnnnnnnnnnnnnnnnnnnnnnnnnnnnnnnnnnnnnnnnnnnnnnnnnnnnnnnnnnnnnnnnnnnnnnnnnnnnnnnnnnnnnnnnnnnnnnnnnnnnnnnnnnnnnnnnnnnnnnnnnnnnnnnnnnnnnnnnnnnnnnnnnnnnnnnnnnnnnnnnnnnnnnnnnnnnnnnnnnnnnnnnnnnnnnnnnnnnnnnnnnnnnnnnnnnnnnnnnnnnnnnnnnnnnnnnnnnnnnnnnnnnnnnnnnnnnnnnnnnnnnnnnnnnnnnnnnnnnnnnnnnnnnnnnnnnnnnnnnnnnnnnnnnnnnnnnnnnnnnnnnnnnnnnnnnnnnnnnnnnnnnnnnnnnnnnnnnnnnnnnnnnnnnnnnnnnnnnnnnnnnnnnnnnnnnnnnnnnnnnnnnnnnnnnnnnnnnnnnnnnnnnnnnnnnnnnnnnnnnnnnnnnnnnnnnnnnnnnnnnnnnnnnnnnnnnnnnnnnnnnnnnnnnnnnnnnnnnnnnnnnnnnnnnnnnnnnnnnnnnnnnnnnnnnnnnnnnnnnnnnnnnnnnnnnnnnnnnnnnnnnnnnnnnnnnnnnnnnnnnnnnnnnnnnnnnnnnnnnnnnnnnnnnnnnnnnnnnnnnnnnnnnnnnnnnnnnnnnnnnnnnnnnnnnnnnnnnnnnnnnnnnnnnnnnnnnnnnnnnnnnnnnnnnnnnnnnnnnnnnnnnnnnnnnnnnnnnnnnnnnnnnnnnnnnnnnnnnnnnnnnnnnnnnnnnnnnnnnnnnnnnnnnnnnnnnnnnnnnnnnnnnnnnnnnnnnnnnnnnnnnnnnnnnnnnnnnnnnnnnnnnnnnnnnnnnnnnnnnnnnnnnnnnnnnnnnnnnnnnnnnnnnnnnnnnnnnnnnnnnnnnnnnnnnnnnnnnnnnnnnnnnnnnnnnnnnnnnnnnnnnnnnnnnnnnnnnnnnnnnnnnnnnnnnnnnnnnnnnnnnnnnnnnnnnnnnnnnnnnnnnnnnnnnnnnnnnnnnnnnnnnnnnnnnnnnnnnnnnnnnnnnnnnnnnnnnnnnnnnnnnnnnnnnnnnnnnnnnnnnnnnnnnnnnnnnnnnnnnnnnnnnnnnnnnnnnnnnnnnnnnnnnnnnnnnnnnnnnnnnnnnnnnnnnnnnnnnnnnnnnnnnnnnnnnnnnnnnnnnnnnnnnnnnnnnnnnnnnnnnnnnnnnnnnnnnnnnnnnnnnnnnnnnnnnnnnnnnnnnnnnnnnnnnnnnnnnnnnnnnnnnnnnnnnnnnnnnnnnnnnnnnnnnnnnnnnnnnnnnnnnnnnnnnnnnnnnnnnnnnnnnnnnnnnnnnnnnnnnnnnnnnnnnnnnnnnnnnnnnnnnnnnnnnnnnnnnnnnnnnnnnnnnnnnnnnnnnnnnnnnnnnnnnnnnnnnnnnnnnnnnnnnnnnnnnnnnnnnnnnnnnnnnnnnnnnnnnnnnnnnnnnnnnnnnnnnnnnnnnnnnnnnnnnnnnnnnnnnnnnnnnnnnnnnnnnnnnnnnnnnnnnnnnnnnnnnnnnnnnnnnnnnnnnnnnnnnnnnnnnnnnnnnnnnnnnnnnnnnnnnnnnnnnnnnnnnnnnnnnnnnnnnnnnnnnnnnnnnnnnnnnnnnnnnnnnnnnnnnnnnnnnnnnnnnnnnnnnnnnnnnnnnnnnnnnnnnnnnnnnnnnnnnnnnnnnnnnnnnnnnnnnnnnnnnnnnnnnnnnnnnnnnnnnnnnnnnnnnnnnnnnnnnnnnnnnnnnnnnnnnnnnnnnnnnnnnnnnnnnnnnnnnnnnnnnnnnnnnnnnnnnnnnnnnnnnnnnnnnnnnnnnnnnnnnnnnnnnnnnnnnnnnnnnnnnnnnnnnnnnnnnnnnnnnnnnnnnnnnnnnnnnnnnnnnnnnnnnnnnnnnnnnnnnnnnnnnnnnnnnnnnnnnnnnnnnnnnnnnnnnnnnnnnnnnnnnnnnnnnnnnnnnnnnnnnnnnnnnnnnnnnnnnnnnnnnnnnnnnnnnnnnnnnnnnnnnnnnnnnnnnnnnnnnnnnnnnnnnnnnnnnnnnnnnnnnnnnnnnnnnnnnnnnnnnnnnnnnnnnnnnnnnnnnnnnnnnnnnnnnnnnnnnnnnnnnnnnnnnnnnnnnnnnnnnnnnnnnnnnnnnnnnnnnnnnnnnnnnnnnnnnnnnnnnnnnnnnnnnnnnnnnnnnnnnnnnnnnnnnnnnnnnnnnnnnnnnnnnnnnnnnnnnnnnnnnnnnnnnnnnnnnnnnnnnnnnnnnnnnnnnnnnnnnnnnnnnnnnnnnnnnnnnnnnnnnnnnnnnnnnnnnnnnnnnnnnnnnnnnnnnnnnnnnnnnnnnnnnnnnnnnnnnnnnnnnnnnnnnnnnnnnnnnnnnnnnnnnnnnnnnnnnnnnnnnnnnnnnnnnnnnnnnnnnnnnnnnnnnnnnnnnnnnnnnnnnnnnnnnnnnnnnnnnnnnnnnnnnnnnnnnnnnnnnnnnnnnnnnnnnnnnnnnnnnnnnnnnnnnnnnnnnnnnnnnnnnnnnnnnnnnnnnnnnnnnnnnnnnnnnnnnnnnnnnnnnnnnnnnnnnnnnnnnnnnnnnnnnnnnnnnnnnnnnnnnnnnnnnnnnnnnnnnnnnnnnnnnnnnnnnnnnnnnnnnnnnnnnnnnnnnnnnnnnnnnnnnnnnnnnnnnnnnnnnnnnnnnnnnnnnnnnnnnnnnnnnnnnnnnnnnnnnnnnnnnnnnnnnnnnnnnnnnnnnnnnnnnnnnnnnnnnnnnnnnnnnnnnnnnnnnnnnnnnnnnnnnnnnnnnnnnnnnnnnnnnnnnnnnnnnnnnnnnnnnnnnnnnnnnnnnnnnnnnnnnnnnnnnnnnnnnnnnnnnnnnnnnnnnnnnnnnnnnnnnnnnnnnnnnnnnnnnnnnnnnnnnnnnnnnnnnnnnnnnnnnnnnnnnnnnnnnnnnnnnnnnnnnnnnnnnnnnnnnnnnnnnnnnnnnnnnnnnnnnnnnnnnnnnnnnnnnnnnnnnnnnnnnnnnnnnnnnnnnnnnnnnnnnnnnnnnnnnnnnnnnnnnnnnnnnnnnnnnnnnnnnnnnnnnnnnnnnnnnnnnnnnnnnnnnnnnnnnnnnnnnnnnnnnnnnnnnnnnnnnnnnnnnnnnnnnnnnnnnnnnnnnnnnnnnnnnnnnnnnnnnnnnnnnnnnnnnnnnnnnnnnnnnnnnnnnnnnnnnnnnnnnnnnnnnnnnnnnnnnnnnnnnnnnnnnnnnnnnnnnnnnnnnnnnnnnnnnnnnnnnnnnnnnnnnnnnnnnnnnnnnnnnnnnnnnnnnnnnnnnnnnnnnnnnnnnnnnnnnnnnnnnnnnnnnnnnnnnnnnnnnnnnnnnnnnnnnnnnnnnnnnnnnnnnnnnnnnnnnnnnnnnnnnnnnnnnnnnnnnnnnnnnnnnnnnnnnnnnnnnnnnnnnnnnnnnnnnnnnnnnnnnnnnnnnnnnnnnnnnnnnnnnnnnnnnnnnnnnnnnnnnnnnnnnnnnnnnnnnnnnnnnnnnnnnnnnnnnnnnnnnnnnnnnnnnnnnnnnnnnnnnnnnnnnnnnnnnnnnnnnnnnnnnnnnnnnnnnnnnnnnnnnnnnnnnnnnnnnnnnnnnnnnnnnnnnnnnnnnnnnnnnnnnnnnnnnnnnnnnnnnnnnnnnnnnnnnnnnnnnnnnnnnnnnnnnnnnnnnnnnnnnnnnnnnnnnnnnnnnnnnnnnnnnnnnnnnnnnnnnnnnnnnnnnnnnnnnnnnnnnnnnnnnnnnnnnnnnnnnnnnnnnnnnnnnnnnnnnnnnnnnnnnnnnnnnnnnnnnnnnnnnnnnnnnnnnnnnnnnnnnnnnnnnnnnnnnnnnnnnnnnnnnnnnnnnnnnnnnnnnnnnnnnnnnnnnnnnnnnnnnnnnnnnnnnnnnnnnnnnnnnnnnnnnnnnnnnnnnnnnnnnnnnnnnnnnnnnnnnnnnnnnnnnnnnnnnnnnnnnnnnnnnnnnnnnnnnnnnnnnnnnnnnnnnnnnnnnnnnnnnnnnnnnnnnnnnnnnnnnnnnnnnnnnnnnnnnnnnnnnnnnnnnnnnnnnnnnnnnnnnnnnnnnnnnnnnnnnnnnnnnnnnnnnnnnnnnnnnnnnnnnnnnnnnnnnnnnnnnnnnnnnnnnnnnnnnnnnnnnnnnnnnnnnnnnnnnnnnnnnnnnnnnnnnnnnnnnnnnnnnnnnnnnnnnnnnnnnnnnnnnnnnnnnnnnnnnnnnnnnnnnnnnnnnnnnnnnnnnnnnnnnnnnnnnnnnnnnnnnnnnnnnnnnnnnnnnnnnnnnnnnnnnnnnnnnnnnnnnnnnnnnnnnnnnnnnnnnnnnnnnnnnnnnnnnnnnnnnnnnnnnnnnnnnnnnnnnnnnnnnnnnnnnnnnnnnnnnnnnnnnnnnnnnnnnnnnnnnnnnnnnnnnnnnnnnnnnnnnnnnnnnnnnnnnnnnnnnnnnnnnnnnnnnnnnnnnnnnnnnnnnnnnnnnnnnnnnnnnnnnnnnnnnnnnnnnnnnnnnnnnnnnnnnnnnnnnnnnnnnnnnnnnnnnnnnnnnnnnnnnnnnnnnnnnnnnnnnnnnnnnnnnnnnnnnnnnnnnnnnnnnnnnnnnnnnnnnnnnnnnnnnnnnnnnnnnnnnnnnnnnnnnnnnnnnnnnnnnnnnnnnnnnnnnnnnnnnnnnnnnnnnnnnnnnnnnnnnnnnnnnnnnnnnnnnnnnnnnnnnnnnnnnnnnnnnnnnnnnnnnnnnnnnnnnnnnnnnnnnnnnnnnnnnnnnnnnnnnnnnnnnnnnnnnnnnnnnnnnnnnnnnnnnnnnnnnnnnnnnnnnnnnnnnnnnnnnnnnnnnnnnnnnnnnnnnnnnnnnnnnnnnnnnnnnnnnnnnnnnnnnnnnnnnnnnnnnnnnnnnnnnnnnnnnnnnnnnnnnnnnnnnnnnnnnnnnnnnnnnnnnnnnnnnnnnnnnnnnnnnnnnnnnnnnnnnnnnnnnnnnnnnnnnnnnnnnnnnnnnnnnnnnnnnnnnnnnnnnnnnnnnnnnnnnnnnnnnnnnnnnnnnnnnnnnnnnnnnnnnnnnnnnnnnnnnnnnnnnnnnnnnnnnnnnnnnnnnnnnnnnnnnnnnnnnnnnnnnnnnnnnnnnnnnnnnnnnnnnnnnnnnnnnnnnnnnnnnnnnnnnnnnnnnnnnnnnnnnnnnnnnnnnnnnnnnnnnnnnnnnnnnnnnnnnnnnnnnnnnnnnnnnnnnnnnnnnnnnnnnnnnnnnnnnnnnnnnnnnnnnnnnnnnnnnnnnnnnnnnnnnnnnnnnnnnnnnnnnnnnnnnnnnnnnnnnnnnnnnnnnnnnnnnnnnnnnnnnnnnnnnnnnnnnnnnnnnnnnnnnnnnnnnnnnnnnnnnnnnnnnnnnnnnnnnnnnnnnnnnnnnnnnnnnnnnnnnnnnnnnnnnnnnnnnnnnnnnnnnnnnnnnnnnnnnnnnnnnnnnnnnnnnnnnnnnnnnnnnnnnnnnnnnnnnnnnnnnnnnnnnnnnnnnnnnnnnnnnnnnnnnnnnnnnnnnnnnnnnnnnnnnnnnnnnnnnnnnnnnnnnnnnnnnnnnnnnnnnnnnnnnnnnnnnnnnnnnnnnnnnnnnnnnnnnnnnnnnnnnnnnnnnnnnnnnnnnnnnnnnnnnnnnnnnnnnnnnnnnnnnnnnnnnnnnnnnnnnnnnnnnnnnnnnnnnnnnnnnnnnnnnnnnnnnnnnnnnnnnnnnnnnnnnnnnnnnnnnnnnnnnnnnnnnnnnnnnnnnnnnnnnnnnnnnnnnnnnnnnnnnnnnnnnnnnnnnnnnnnnnnnnnnnnnnnnnnnnnnnnnnnnnnnnnnnnnnnnnnnnnnnnnnnnnnnnnnnnnnnnnnnnnnnnnnnnnnnnnnnnnnnnnnnnnnnnnnnnnnnnnnnnnnnnnnnnnnnnnnnnnnnnnnnnnnnnnnnnnnnnnnnnnnnnnnnnnnnnnnnnnnnnnnnnnnnnnnnnnnnnnnnnnnnnnnnnnnnnnnnnnnnnnnnnnnnnnnnnnnnnnnnnnnnnnnnnnnnnnnnnnnnnnnnnnnnnnnnnnnnnnnnnnnnnnnnnnnnnnnnnnnnnnnnnnnnnnnnnnnnnnnnnnnnnnnnnnnnnnnnnnnnnnnnnnnnnnnnnnnnnnnnnnnnnnnnnnnnnnnnnnnnnnnnnnnnnnnnnnnnnnnnnnnnnnnnnnnnnnnnnnnnnnnnnnnnnnnnnnnnnnnnnnnnnnnnnnnnnnnnnnnnnnnnnnnnnnnnnnnnnnnnnnnnnnnnnnnnnnnnnnnnnnnnnnnnnnnnnnnnnnnnnnnnnnnnnnnnnnnnnnnnnnnnnnnnnnnnnnnnnnnnnnnnnnnnnnnnnnnnnnnnnnnnnnnnnnnnnnnnnnnnnnnnnnnnnnnnnnnnnnnnnnnnnnnnnnnnnnnnnnnnnnnnnnnnnnnnnnnnnnnnnnnnnnnnnnnnnnnnnnnnnnnnnnnnnnnnnnnnnnnnnnnnnnnnnnnnnnnnnnnnnnnnnnnnnnnnnnnnnnnnnnnnnnnnnnnnnnnnnnnnnnnnnnnnnnnnnnnnnnnnnnnnnnnnnnnnnnnnnnnnnnnnnnnnnnnnnnnnnnnnnnnnnnnnnnnnnnnnnnnnnnnnnnnnnnnnnnnnnnnnnnnnnnnnnnnnnnnnnnnnnnnnnnnnnnnnnnnnnnnnnnnnnnnnnnnnnnnnnnnnnnnnnnnnnnnnnnnnnnnnnnnnnnnnnnnnnnnnnnnnnnnnnnnnnnnnnnnnnnnnnnnnnnnnnnnnnnnnnnnnnnnnnnnnnnnnnnnnnnnnnnnnnnnnnnnnnnnnnnnnnnnnnnnnnnnnnnnnnnnnnnnnnnnnnnnnnnnnnnnnnnnnnnnnnnnnnnnnnnnnnnnnnnnnnnnnnnnnnnnnnnnnnnnnnnnnnnnnnnnnnnnnnnnnnnnnnnnnnnnnnnnnnnnnnnnnnnnnnnnnnnnnnnnnnnnnnnnnnnnnnnnnnnnnnnnnnnnnnnnnnnnnnnnnnnnnnnnnnnnnnnnnnnnnnnnnnnnnnnnnnnnnnnnnnnnnnnnnnnnnnnnnnnnnnnnnnnnnnnnnnnnnnnnnnnnnnnnnnnnnnnnnnnnnnnnnnnnnnnnnnnnnnnnnnnnnnnnnnnnnnnnnnnnnnnnnnnnnnnnnnnnnnnnnnnnnnnnnnnnnnnnnnnnnnnnnnnnnnnnnnnnnnnnnnnnnnnnnnnnnnnnnnnnnnnnnnnnnnnnnnnnnnnnnnnnnnnnnnnnnnnnnnnnnnnnnnnnnnnnnnnnnnnnnnnnnnnnnnnnnnnnnnnnnnnnnnnnnnnnnnnnnnnnnnnnnnnnnnnnnnnnnnnnnnnnnnnnnnnnnnnnnnnnnnnnnnnnnnnnnnnnnnnnnnnnnnnnnnnnnnnnnnnnnnnnnnnnnnnnnnnnnnnnnnnnnnnnnnnnnnnnnnnnnnnnnnnnnnnnnnnnnnnnnnnnnnnnnnnnnnnnnnnnnnnnnnnnnnnnnnnnnnnnnnnnnnnnnnnnnnnnnnnnnnnnnnnnnnnnnnnnnnnnnnnnnnnnnnnnnnnnnnnnnnnnnnnnnnnnnnnnnnnnnnnnnnnnnnnnnnnnnnnnnnnnnnnnnnnnnnnnnnnnnnnnnnnnnnnnnnnnnnnnnnnnnnnnnnnnnnnnnnnnnnnnnnnnnnnnnnnnnnnnnnnnnnnnnnnnnnnnnnnnnnnnnnnnnnnnnnnnnnnnnnnnnnnnnnnnnnnnnnnnnnnnnnnnnnnnnnnnnnnnnnnnnnnnnnnnnnnnnnnnnnnnnnnnnnnnnnnnnnnnnnnnnnnnnnnnnnnnnnnnnnnnnnnnnnnnnnnnnnnnnnnnnnnnnnnnnnnnnnnnnnnnnnnnnnnnnnnnnnnnnnnnnnnnnnnnnnnnnnnnnnnnnnnnnnnnnnnnnnnnnnnnnnnnnnnnnnnnnnnnnnnnnnnnnnnnnnnnnnnnnnnnnnnnnnnnnnnnnnnnnnnnnnnnnnnnnnnnnnnnnnnnnnnnnnnnnnnnnnnnnnnnnnnnnnnnnnnnnnnnnnnnnnnnnnnnnnnnnnnnnnnnnnnnnnnnnnnnnnnnnnnnnnnnnnnnnnnnnnnnnnnnnnnnnnnnnnnnnnnnnnnnnnnnnnnnnnnnnnnnnnnnnnnnnnnnnnnnnnnnnnnnnnnnnnnnnnnnnnnnnnnnnnnnnnnnnnnnnnnnnnnnnnnnnnnnnnnnnnnnnnnnnnnnnnnnnnnnnnnnnnnnnnnnnnnnnnnnnnnnnnnnnnnnnnnnnnnnnnnnnnnnnnnnnnnnnnnnnnnnnnnnnnnnnnnnnnnnnnnnnnnnnnnnnnnnnnnnnnnnnnnnnnnnnnnnnnnnnnnnnnnnnnnnnnnnnnnnnnnnnnnnnnnnnnnnnnnnnnnnnnnnnnnnnnnnnnnnnnnnnnnnnnnnnnnnnnnnnnnnnnnnnnnnnnnnnnnnnnnnnnnnnnnnnnnnnnnnnnnnnnnnnnnnnnnnnnnnnnnnnnnnnnnnnnnnnnnnnnnnnnnnnnnnnnnnnnnnnnnnnnnnnnnnnnnnnnnnnnnnnnnnnnnnnnnnnnnnnnnnnnnnnnnnnnnnnnnnnnnnnnnnnnnnnnnnnnnnnnnnnnnnnnnnnnnnnnnnnnnnnnnnnnnnnnnnnnnnnnnnnnnnnnnnnnnnnnnnnnnnnnnnnnnnnnnnnnnnnnnnnnnnnnnnnnnnnnnnnnnnnnnnnnnnnnnnnnnnnnnnnnnnnnnnnnnnnnnnnnnnnnnnnnnnnnnnnnnnnnnnnnnnnnnnnnnnnnnnnnnnnnnnnnnnnnnnnnnnnnnnnnnnnnnnnnnnnnnnnnnnnnnnnnnnnnnnnnnnnnnnnnnnnnnnnnnnnnnnnnnnnnnnnnnnnnnnnnnnnnnnnnnnnnnnnnnnnnnnnnnnnnnnnnnnnnnnnnnnnnnnnnnnnnnnnnnnnnnnnnnnnnnnnnnnnnnnnnnnnnnnnnnnnnnnnnnnnnnnnnnnnnnnnnnnnnnnnnnnnnnnnnnnnnnnnnnnnnnnnnnnnnnnnnnnnnnnnnnnnnnnnnnnnnnnnnnnnnnnnnnnnnnnnnnnnnnnnnnnnnnnnnnnnnnnnnnnnnnnnnnnnnnnnnnnnnnnnnnnnnnnnnnnnnnnnnnnnnnnnnnnnnnnnnnnnnnnnnnnnnnnnnnnnnnnnnnnnnnnnnnnnnnnnnnnnnnnnnnnnnnnnnnnnnnnnnnnnnnnnnnnnnnnnnnnnnnnnnnnnnnnnnnnnnnnnnnnnnnnnnnnnnnnnnnnnnnnnnnnnnnnnnnnnnnnnnnnnnnnnnnnnnnnnnnnnnnnnnnnnnnnnnnnnnnnnnnnnnnnnnnnnnnnnnnnnnnnnnnnnnnnnnnnnnnnnnnnnnnnnnnnnnnnnnnnnnnnnnnnnnnnnnnnnnnnnnnnnnnnnnnnnnnnnnnnnnnnnnnnnnnnnnnnnnnnnnnnnnnnnnnnnnnnnnnnnnnnnnnnnnnnnnnnnnnnnnnnnnnnnnnnnnnnnnnnnnnnnnnnnnnnnnnnnnnnnnnnnnnnnnnnnnnnnnnnnnnnnnnnnnnnnnnnnnnnnnnnnnnnnnnnnnnnnnnnnnnnnnnnnnnnnnnnnnnnnnnnnnnnnnnnnnnnnnnnnnnnnnnnnnnnnnnnnnnnnnnnnnnnnnnnnnnnnnnnnnnnnnnnnnnnnnnnnnnnnnnnnnnnnnnnnnnnnnnnnnnnnnnnnnnnnnnnnnnnnnnnnnnnnnnnnnnnnnnnnnnnnnnnnnnnnnnnnnnnnnnnnnnnnnnnnnnnnnnnnnnnnnnnnnnnnnnnnnnnnnnnnnnnnnnnnnnnnnnnnnnnnnnnnnnnnnnnnnnnnnnnnnnnnnnnnnnnnnnnnnnnnnnnnnnnnnnnnnnnnnnnnnnnnnnnnnnnnnnnnnnnnnnnnnnnnnnnnnnnnnnnnnnnnnnnnnnnnnnnnnnnnnnnnnnnnnnnnnnnnnnnnnnnnnnnnnnnnnnnnnnnnnnnnnnnnnnnnnnnnnnnnnnnnnnnnnnnnnnnnnnnnnnnnnnnnnnnnnnnnnnnnnnnnnnnnnnnnnnnnnnnnnnnnnnnnnnnnnnnnnnnnnnnnnnnnnnnnnnnnnnnnnnnnnnnnnnnnnnnnnnnnnnnnnnnnnnnnnnnnnnnnnnnnnnnnnnnnnnnnnnnnnnnnnnnnnnnnnnnnnnnnnnnnnnnnnnnnnnnnnnnnnnnnnnnnnnnnnnnnnnnnnnnnnnnnnnnnnnnnnnnnnnnnnnnnnnnnnnnnnnnnnnnnnnnnnnnnnnnnnnnnnnnnnnnnnnnnnnnnnnnnnnnnnnnnnnnnnnnnnnnnnnnnnnnnnnnnnnnnnnnnnnnnnnnnnnnnnnnnnnnnnnnnnnnnnnnnnnnnnnnnnnnnnnnnnnnnnnnnnnnnnnnnnnnnnnnnnnnnnnnnnnnnnnnnnnnnnnnnnnnnnnnnnnnnnnnnnnnnnnnnnnnnnnnnnnnnnnnnnnnnnnnnnnnnnnnnnnnnnnnnnnnnnnnnnnnnnnnnnnnnnnnnnnnnnnnnnnnnnnnnnnnnnnnnnnnnnnnnnnnnnnnnnnnnnnnnnnnnnnnnnnnnnnnnnnnnnnnnnnnnnnnnnnnnnnnnnnnnnnnnnnnnnnnnnnnnnnnnnnnnnnnnnnnnnnnnnnnnnnnnnnnnnnnnnnnnnnnnnnnnnnnnnnnnnnnnnnnnnnnnnnnnnnnnnnnnnnnnnnnnnnnnnnnnnnnnnnnnnnnnnnnnnnnnnnnnnnnnnnnnnnnnnnnnnnnnnnnnnnnnnnnnnnnnnnnnnnnnnnnnnnnnnnnnnnnnnnnnnnnnnnnnnnnnnnnnnnnnnnnnnnnnnnnnnnnnnnnnnnnnnnnnnnnnnnnnnnnnnnnnnnnnnnnnnnnnnnnnnnnnnnnnnnnnnnnnnnnnnnnnnnnnnnnnnnnnnnnnnnnnnnnnnnnnnnnnnnnnnnnnnnnnnnnnnnnnnnnnnnnnnnnnnnnnnnnnnnnnnnnnnnnnnnnnnnnnnnnnnnnnnnnnnnnnnnnnnnnnnnnnnnnnnnnnnnnnnnnnnnnnnnnnnnnnnnnnnnnnnnnnnnnnnnnnnnnnnnnnnnnnnnnnnnnnnnnnnnnnnnnnnnnnnnnnnnnnnnnnnnnnnnnnnnnnnnnnnnnnnnnnnnnnnnnnnnnnnnnnnnnnnnnnnnnnnnnnnnnnnnnnnnnnnnnnnnnnnnnnnnnnnnnnnnnnnnnnnnnnnnnnnnnnnnnnnnnnnnnnnnnnnnnnnnnnnnnnnnnnnnnnnnnnnnnnnnnnnnnnnnnnnnnnnnnnnnnnnnnnnnnnnnnnnnnnnnnnnnnnnnnnnnnnnnnnnnnnnnnnnnnnnnnnnnnnnnnnnnnnnnnnnnnnnnnnnnnnnnnnnnnnnnnnnnnnnnnnnnnnnnnnnnnnnnnnnnnnnnnnnnnnnnnnnnnnnnnnnnnnnnnnnnnnnnnnnnnnnnnnnnnnnnnnnnnnnnnnnnnnnnnnnnnnnnnnnnnnnnnnnnnnnnnnnnnnnnnnnnnnnnnnnnnnnnnnnnnnnnnnnnnnnnnnnnnnnnnnnnnnnnnnnnnnnnnnnnnnnnnnnnnnnnnnnnnnnnnnnnnnnnnnnnnnnnnnnnnnnnnnnnnnnnnnnnnnnnnnnnnnnnnnnnnnnnnnnnnnnnnnnnnnnnnnnnnnnnnnnnnnnnnnnnnnnnnnnnnnnnnnnnnnnnnnnnnnnnnnnnnnnnnnnnnnnnnnnnnnnnnnnnnnnnnnnnnnnnnnnnnnnnnnnnnnnnnnnnnnnnnnnnnnnnnnnnnnnnnnnnnnnnnnnnnnnnnnnnnnnnnnnnnnnnnnnnnnnnnnnnnnnnnnnnnnnnnnnnnnnnnnnnnnnnnnnnnnnnnnnnnnnnnnnnnnnnnnnnnnnnnnnnnnnnnnnnnnnnnnnnnnnnnnnnnnnnnnnnnnnnnnnnnnnnnnnnnnnnnnnnnnnnnnnnnnnnnnnnnnnnnnnnnnnnnnnnnnnnnnnnnnnnnnnnnnnnnnnnnnnnnnnnnnnnnnnnnnnnnnnnnnnnnnnnnnnnnnnnnnnnnnnnnnnnnnnnnnnnnnnnnnnnnnnnnnnnnnnnnnnnnnnnnnnnnnnnnnnnnnnnnnnnnnnnnnnnnnnnnnnnnnnnnnnnnnnnnnnnnnnnnnnnnnnnnnnnnnnnnnnnnnnnnnnnnnnnnnnnnnnnnnnnnnnnnnnnnnnnnnnnnnnnnnnnnnnnnnnnnnnnnnnnnnnnnnnnnnnnnnnnnnnnnnnnnnnnnnnnnnnnnnnnnnnnnnnnnnnnnnnnnnnnnnnnnnnnnnnnnnnnnnnnnnnnnnnnnnnnnnnnnnnnnnnnnnnnnnnnnnnnnnnnnnnnnnnnnnnnnnnnnnnnnnnnnnnnnnnnnnnnnnnnnnnnnnnnnnnnnnnnnnnnnnnnnnnnnnnnnnnnnnnnnnnnnnnnnnnnnnnnnnnnnnnnnnnnnnnnnnnnnnnnnnnnnnnnnnnnnnnnnnnnnnnnnnnnnnnnnnnnnnnnnnnnnnnnnnnnnnnnnnnnnnnnnnnnnnnnnnnnnnnnnnnnnnnnnnnnnnnnnnnnnnnnnnnnnnnnnnnnnnnnnnnnnnnnnnnnnnnnnnnnnnnnnnnnnnnnnnnnnnnnnnnnnnnnnnnnnnnnnnnnnnnnnnnnnnnnnnnnnnnnnnnnnnnnnnnnnnnnnnnnnnnnnnnnnnnnnnnnnnnnnnnnnnnnnnnnnnnnnnnnnnnnnnnnnnnnnnnnnnnnnnnnnnnnnnnnnnnnnnnnnnnnnnnnnnnnnnnnnnnnnnnnnnnnnnnnnnnnnnnnnnnnnnnnnnnnnnnnnnnnnnnnnnnnnnnnnnnnnnnnnnnnnnnnnnnnnnnnnnnnnnnnnnnnnnnnnnnnnnnnnnnnnnnnnnnnnnnnnnnnnnnnnnnnnnnnnnnnnnnnnnnnnnnnnnnnnnnnnnnnnnnnnnnnnnnnnnnnnnnnnnnnnnnnnnnnnnnnnnnnnnnnnnnnnnnnnnnnnnnnnnnnnnnnnnnnnnnnnnnnnnnnnnnnnnnnnnnnnnnnnnnnnnnnnnnnnnnnnnnnnnnnnnnnnnnnnnnnnnnnnnnnnnnnnnnnnnnnnnnnnnnnnnnnnnnnnnnnnnnnnnnnnnnnnnnnnnnnnnnnnnnnnnnnnnnnnnnnnnnnnnnnnnnnnnnnnnnnnnnnnnnnnnnnnnnnnnnnnnnnnnnnnnnnnnnnnnnnnnnnnnnnnnnnnnnnnnnnnnnnnnnnnnnnnnnnnnnnnnnnnnnnnnnnnnnnnnnnnnnnnnnnnnnnnnnnnnnnnnnnnnnnnnnnnnnnnnnnnnnnnnnnnnnnnnnnnnnnnnnnnnnnnnnnnnnnnnnnnnnnnnnnnnnnnnnnnnnnnnnnnnnnnnnnnnnnnnnnnnnnnnnnnnnnnnnnnnnnnnnnnnnnnnnnnnnnnnnnnnnnnnnnnnnnnnnnnnnnnnnnnnnnnnnnnnnnnnnnnnnnnnnnnnnnnnnnnnnnnnnnnnnnnnnnnnnnnnnnnnnnnnnnnnnnnnnnnnnnnnnnnnnnnnnnnnnnnnnnnnnnnnnnnnnnnnnnnnnnnnnnnnnnnnnnnnnnnnnnnnnnnnnnnnnnnnnnnnnnnnnnnnnnnnnnnnnnnnnnnnnnnnnnnnnnnnnnnnnnnnnnnnnnnnnnnnnnnnnnnnnnnnnnnnnnnnnnnnnnnnnnnnnnnnnnnnnnnnnnnnnnnnnnnnnnnnnnnnnnnnnnnnnnnnnnnnnnnnnnnnnnnnnnnnnnnnnnnnnnnnnnnnnnnnnnnnnnnnnnnnnnnnnnnnnnnnnnnnnnnnnnnnnnnnnnnnnnnnnnnnnnnnnnnnnnnnnnnnnnnnnnnnnnnnnnnnnnnnnnnnnnnnnnnnnnnnnnnnnnnnnnnnnnnnnnnnnnnnnnnnnnnnnnnnnnnnnnnnnnnnnnnnnnnnnnnnnnnnnnnnnnnnnnnnnnnnnnnnnnnnnnnnnnnnnnnnnnnnnnnnnnnnnnnnnnnnnnnnnnnnnnnnnnnnnnnnnnnnnnnnnnnnnnnnnnnnnnnnnnnnnnnnnnnnnnnnnnnnnnnnnnnnnnnnnnnnnnnnnnnnnnnnnnnnnnnnnnnnnnnnnnnnnnnnnnnnnnnnnnnnnnnnnnnnnnnnnnnnnnnnnnnnnnnnnnnnnnnnnnnnnnnnnnnnnnnnnnnnnnnnnnnnnnnnnnnnnnnnnnnnnnnnnnnnnnnnnnnnnnnnnnnnnnnnnnnnnnnnnnnnnnnnnnnnnnnnnnnnnnnnnnnnnnnnnnnnnnnnnnnnnnnnnnnnnnnnnnnnnnnnnnnnnnnnnnnnnnnnnnnnnnnnnnnnnnnnnnnnnnnnnnnnnnnnnnnnnnnnnnnnnnnnnnnnnnnnnnnnnnnnnnnnnnnnnnnnnnnnnnnnnnnnnnnnnnnnnnnnnnnnnnnnnnnnnnnnnnnnnnnnnnnnnnnnnnnnnnnnnnnnnnnnnnnnnnnnnnnnnnnnnnnnnnnnnnnnnnnnnnnnnnnnnnnnnnnnnnnnnnnnnnnnnnnnnnnnnnnnnnnnnnnnnnnnnnnnnnnnnnnnnnnnnnnnnnnnnnnnnnnnnnnnnnnnnnnnnnnnnnnnnnnnnnnnnnnnnnnnnnnnnnnnnnnnnnnnnnnnnnnnnnnnnnnnnnnnnnnnnnnnnnnnnnnnnnnnnnnnnnnnnnnnnnnnnnnnnnnnnnnnnnnnnnnnnnnnnnnnnnnnnnnnnnnnnnnnnnnnnnnnnnnnnnnnnnnnnnnnnnnnnnnnnnnnnnnnnnnnnnnnnnnnnnnnnnnnnnnnnnnnnnnnnnnnnnnnnnnnnnnnnnnnnnnnnnnnnnnnnnnnnnnnnnnnnnnnnnnnnnnnnnnnnnnnnnnnnnnnnnnnnnnnnnnnnnnnnnnnnnnnnnnnnnnnnnnnnnnnnnnnnnnnnnnnnnnnnnnnnnnnnnnnnnnnnnnnnnnnnnnnnnnnnnnnnnnnnnnnnnnnnnnnnnnnnnnnnnnnnnnnnnnnnnnnnnnnnnnnnnnnnnnnnnnnnnnnnnnnnnnnnnnnnnnnnnnnnnnnnnnnnnnnnnnnnnnnnnnnnnnnnnnnnnnnnnnnnnnnnnnnnnnnnnnnnnnnnnnnnnnnnnnnnnnnnnnnnnnnnnnnnnnnnnnnnnnnnnnnnnnnnnnnnnnnnnnnnnnnnnnnnnnnnnnnnnnnnnnnnnnnnnnnnnnnnnnnnnnnnnnnnnnnnnnnnnnnnnnnnnnnnnnnnnnnnnnnnnnnnnnnnnnnnnnnnnnnnnnnnnnnnnnnnnnnnnnnnnnnnnnnnnnnnnnnnnnnnnnnnnnnnnnnnnnnnnnnnnnnnnnnnnnnnnnnnnnnnnnnnnnnnnnnnnnnnnnnnnnnnnnnnnnnnnnnnnnnnnnnnnnnnnnnnnnnnnnnnnnnnnnnnnnnnnnnnnnnnnnnnnnnnnnnnnnnnnnnnnnnnnnnnnnnnnnnnnnnnnnnnnnnnnnnnnnnnnnnnnnnnnnnnnnnnnnnnnnnnnnnnnnnnnnnnnnnnnnnnnnnnnnnnnnnnnnnnnnnnnnnnnnnnnnnnnnnnnnnnnnnnnnnnnnnnnnnnnnnnnnnnnnnnnnnnnnnnnnnnnnnnnnnnnnnnnnnnnnnnnnnnnnnnnnnnnnnnnnnnnnnnnnnnnnnnnnnnnnnnnnnnnnnnnnnnnnnnnnnnnnnnnnnnnnnnnnnnnnnnnnnnnnnnnnnnnnnnnnnnnnnnnnnnnnnnnnnnnnnnnnnnnnnnnnnnnnnnnnnnnnnnnnnnnnnnnnnnnnnnnnnnnnnnnnnnnnnnnnnnnnnnnnnnnnnnnnnnnnnnnnnnnnnnnnnnnnnnnnnnnnnnnnnnnnnnnnnnnnnnnnnnnnnnnnnnnnnnnnnnnnnnnnnnnnnnnnnnnnnnnnnnnnnnnnnnnnnnnnnnnnnnnnnnnnnnnnnnnnnnnnnnnnnnnnnnnnnnnnnnnnnnnnnnnnnnnnnnnnnnnnnnnnnnnnnnnnnnnnnnnnnnnnnnnnnnnnnnnnnnnnnnnnnnnnnnnnnnnnnnnnnnnnnnnnnnnnnnnnnnnnnnnnnnnnnnnnnnnnnnnnnnnnnnnnnnnnnnnnnnnnnnnnnnnnnnnnnnnnnnnnnnnnnnnnnnnnnnnnnnnnnnnnnnnnnnnnnnnnnnnnnnnnnnnnnnnnnnnnnnnnnnnnnnnnnnnnnnnnnnnnnnnnnnnnnnnnnnnnnnnnnnnnnnnnnnnnnnnnnnnnnnnnnnnnnnnnnnnnnnnnnnnnnnnnnnnnnnnnnnnnnnnnnnnnnnnnnnnnnnnnnnnnnnnnnnnnnnnnnnnnnnnnnnnnnnnnnnnnnnnnnnnnnnnnnnnnnnnnnnnnnnnnnnnnnnnnnnnnnnnnnnnnnnnnnnnnnnnnnnnnnnnnnnnnnnnnnnnnnnnnnnnnnnnnnnnnnnnnnnnnnnnnnnnnnnnnnnnnnnnnnnnnnnnnnnnnnnnnnnnnnnnnnnnnnnnnnnnnnnnnnnnnnnnnnnnnnnnnnnnnnnnnnnnnnnnnnnnnnnnnnnnnnnnnnnnnnnnnnnnnnnnnnnnnnnnnnnnnnnnnnnnnnnnnnnnnnnnnnnnnnnnnnnnnnnnnnnnnnnnnnnnnnnnnnnnnnnnnnnnnnnnnnnnnnnnnnnnnnnnnnnnnnnnnnnnnnnnnnnnnnnnnnnnnnnnnnnnnnnnnnnnnnnnnnnnnnnnnnnnnnnnnnnnnnnnnnnnnnnnnnnnnnnnnnnnnnnnnnnnnnnnnnnnnnnnnnnnnnnnnnnnnnnnnnnnnnnnnnnnnnnnnnnnnnnnnnnnnnnnnnnnnnnnnnnnnnnnnnnnnnnnnnnnnnnnnnnnnnnnnnnnnnnnnnnnnnnnnnnnnnnnnnnnnnnnnnnnnnnnnnnnnnnnnnnnnnnnnnnnnnnnnnnnnnnnnnnnnnnnnnnnnnnnnnnnnnnnnnnnnnnnnnnnnnnnnnnnnnnnnnnnnnnnnnnnnnnnnnnnnnnnnnnnnnnnnnnnnnnnnnnnnnnnnnnnnnnnnnnnnnnnnnnnnnnnnnnnnnnnnnnnnnnnnnnnnnnnnnnnnnnnnnnnnnnnnnnnnnnnnnnnnnnnnnnnnnnnnnnnnnnnnnnnnnnnnnnnnnnnnnnnnnnnnnnnnnnnnnnnnnnnnnnnnnnnnnnnnnnnnnnnnnnnnnnnnnnnnnnnnnnnnnnnnnnnnnnnnnnnnnnnnnnnnnnnnnnnnnnnnnnnnnnnnnnnnnnnnnnnnnnnnnnnnnnnnnnnnnnnnnnnnnnnnnnnnnnnnnnnnnnnnnnnnnnnnnnnnnnnnnnnnnnnnnnnnnnnnnnnnnnnnnnnnnnnnnnnnnnnnnnnnnnnnnnnnnnnnnnnnnnnnnnnnnnnnnnnnnnnnnnnnnnnnnnnnnnnnnnnnnnnnnnnnnnnnnnnnnnnnnnnnnnnnnnnnnnnnnnnnnnnnnnnnnnnnnnnnnnnnnnnnnnnnnnnnnnnnnnnnnnnnnnnnnnnnnnnnnnnnnnnnnnnnnnnnnnnnnnnnnnnnnnnnnnnnnnnnnnnnnnnnnnnnnnnnnnnnnnnnnnnnnnnnnnnnnnnnnnnnnnnnnnnnnnnnnnnnnnnnnnnnnnnnnnnnnnnnnnnnnnnnnnnnnnnnnnnnnnnnnnnnnnnnnnnnnnnnnnnnnnnnnnnnnnnnnnnnnnnnnnnnnnnnnnnnnnnnnnnnnnnnnnnnnnnnnnnnnnnnnnnnnnnnnnnnnnnnnnnnnnnnnnnnnnnnnnnnnnnnnnnnnnnnnnnnnnnnnnnnnnnnnnnnnnnnnnnnnnnnnnnnnnnnnnnnnnnnnnnnnnnnnnnnnnnnnnnnnnnnnnnnnnnnnnnnnnnnnnnnnnnnnnnnnnnnnnnnnnnnnnnnnnnnnnnnnnnnnnnnnnnnnnnnnnnnnnnnnnnnnnnnnnnnnnnnnnnnnnnnnnnnnnnnnnnnnnnnnnnnnnnnnnnnnnnnnnnnnnnnnnnnnnnnnnnnnnnnnnnnnnnnnnnnnnnnnnnnnnnnnnnnnnnnnnnnnnnnnnnnnnnnnnnnnnnnnnnnnnnnnnnnnnnnnnnnnnnnnnnnnnnnnnnnnnnnnnnnnnnnnnnnnnnnnnnnnnnnnnnnnnnnnnnnnnnnnnnnnnnnnnnnnnnnnnnnnnnnnnnnnnnnnnnnnnnnnnnnnnnnnnnnnnnnnnnnnnnnnnnnnnnnnnnnnnnnnnnnnnnnnnnnnnnnnnnnnnnnnnnnnnnnnnnnnnnnnnnnnnnnnnnnnnnnnnnnnnnnnnnnnnnnnnnnnnnnnnnnnnnnnnnnnnnnnnnnnnnnnnnnnnnnnnnnnnnnnnnnnnnnnnnnnnnnnnnnnnnnnnnnnnnnnnnnnnnnnnnnnnnnnnnnnnnnnnnnnnnnnnnnnnnnnnnnnnnnnnnnnnnnnnnnnnnnnnnnnnnnnnnnnnnnnnnnnnnnnnnnnnnnnnnnnnnnnnnnnnnnnnnnnnnnnnnnnnnnnnnnnnnnnnnnnnnnnnnnnnnnnnnnnnnnnnnnnnnnnnnnnnnnnnnnnnnnnnnnnnnnnnnnnnnnnnnnnnnnnnnnnnnnnnnnnnnnnnnnnnnnnnnnnnnnnnnnnnnnnnnnnnnnnnnnnnnnnnnnnnnnnnnnnnnnnnnnnnnnnnnnnnnnnnnnnnnnnnnnnnnnnnnnnnnnnnnnnnnnnnnnnnnnnnnnnnnnnnnnnnnnnnnnnnnnnnnnnnnnnnnnnnnnnnnnnnnnnnnnnnnnnnnnnnnnnnnnnnnnnnnnnnnnnnnnnnnnnnnnnnnnnnnnnnnnnnnnnnnnnnnnnnnnnnnnnnnnnnnnnnnnnnnnnnnnnnnnnnnnnnnnnnnnnnnnnnnnnnnnnnnnnnnnnnnnnnnnnnnnnnnnnnnnnnnnnnnnnnnnnnnnnnnnnnnnnnnnnnnnnnnnnnnnnnnnnnnnnnnnnnnnnnnnnnnnnnnnnnnnnnnnnnnnnnnnnnnnnnnnnnnnnnnnnnnnnnnnnnnnnnnnnnnnnnnnnnnnnnnnnnnnnnnnnnnnnnnnnnnnnnnnnnnnnnnnnnnnnnnnnnnnnnnnnnnnnnnnnnnnnnnnnnnnnnnnnnnnnnnnnnnnnnnnnnnnnnnnnnnnnnnnnnnnnnnnnnnnnnnnnnnnnnnnnnnnnnnnnnnnnnnnnnnnnnnnnnnnnnnnnnnnnnnnnnnnnnnnnnnnnnnnnnnnnnnnnnnnnnnnnnnnnnnnnnnnnnnnnnnnnnnnnnnnnnnnnnnnnnnnnnnnnnnnnnnnnnnnnnnnnnnnnnnnnnnnnnnnnnnnnnnnnnnnnnnnnnnnnnnnnnnnnnnnnnnnnnnnnnnnnnnnnnnnnnnnnnnnnnnnnnnnnnnnnnnnnnnnnnnnnnnnnnnnnnnnnnnnnnnnnnnnnnnnnnnnnnnnnnnnnnnnnnnnnnnnnnnnnnnnnnnnnnnnnnnnnnnnnnnnnnnnnnnnnnnnnnnnnnnnnnnnnnnnnnnnnnnnnnnnnnnnnnnnnnnnnnnnnnnnnnnnnnnnnnnnnnnnnnnnnnnnnnnnnnnnnnnnnnnnnnnnnnnnnnnnnnnnnnnnnnnnnnnnnnnnnnnnnnnnnnnnnnnnnnnnnnnnnnnnnnnnnnnnnnnnnnnnnnnnnnnnnnnnnnnnnnnnnnnnnnnnnnnnnnnnnnnnnnnnnnnnnnnnnnnnnnnnnnnnnnnnnnnnnnnnnnnnnnnnnnnnnnnnnnnnnnnnnnnnnnnnnnnnnnnnnnnnnnnnnnnnnnnnnnnnnnnnnnnnnnnnnnnnnnnnnnnnnnnnnnnnnnnnnnnnnnnnnnnnnnnnnnnnnnnnnnnnnnnnnnnnnnnnnnnnnnnnnnnnnnnnnnnnnnnnnnnnnnnnnnnnnnnnnnnnnnnnnnnnnnnnnnnnnnnnnnnnnnnnnnnnnnnnnnnnnnnnnnnnnnnnnnnnnnnnnnnnnnnnnnnnnnnnnnnnnnnnnnnnnnnnnnnnnnnnnnnnnnnnnnnnnnnnnnnnnnnnnnnnnnnnnnnnnnnnnnnnnnnnnnnnnnnnnnnnnnnnnnnnnnnnnnnnnnnnnnnnnnnnnnnnnnnnnnnnnnnnnnnnnnnnnnnnnnnnnnnnnnnnnnnnnnnnnnnnnnnnnnnnnnnnnnnnnnnnnnnnnnnnnnnnnnnnnnnnnnnnnnnnnnnnnnnnnnnnnnnnnnnnnnnnnnnnnnnnnnnnnnnnnnnnnnnnnnnnnnnnnnnnnnnnnnnnnnnnnnnnnnnnnnnnnnnnnnnnnnnnnnnnnnnnnnnnnnnnnnnnnnnnnnnnnnnnnnnnnnnnnnnnnnnnnnnnnnnnnnnnnnnnnnnnnnnnnnnnnnnnnnnnnnnnnnnnnnnnnnnnnnnnnnnnnnnnnnnnnnnnnnnnnnnnnnnnnnnnnnnnnnnnnnnnnnnnnnnnnnnnnnnnnnnnnnnnnnnnnnnnnnnnnnnnnnnnnnnnnnnnnnnnnnnnnnnnnnnnnnnnnnnnnnnnnnnnnnnnnnnnnnnnnnnnnnnnnnnnnnnnnnnnnnnnnnnnnnnnnnnnnnnnnnnnnnnnnnnnnnnnnnnnnnnnnnnnnnnnnnnnnnnnnnnnnnnnnnnnnnnnnnnnnnnnnnnnnnnnnnnnnnnnnnnnnnnnnnnnnnnnnnnnnnnnnnnnnnnnnnnnnnnnnnnnnnnnnnnnnnnnnnnnnnnnnnnnnnnnnnnnnnnnnnnnnnnnnnnnnnnnnnnnnnnnnnnnnnnnnnnnnnnnnnnnnnnnnnnnnnnnnnnnnnnnnnnnnnnnnnnnnnnnnnnnnnnnnnnnnnnnnnnnnnnnnnnnnnnnnnnnnnnnnnnnnnnnnnnnnnnnnnnnnnnnnnnnnnnnnnnnnnnnnnnnnnnnnnnnnnnnnnnnnnnnnnnnnnnnnnnnnnnnnnnnnnnnnnnnnnnnnnnnnnnnnnnnnnnnnnnnnnnnnnnnnnnnnnnnnnnnnnnnnnnnnnnnnnnnnnnnnnnnnnnnnnnnnnnnnnnnnnnnnnnnnnnnnnnnnnnnnnnnnnnnnnnnnnnnnnnnnnnnnnnnnnnnnnnnnnnnnnnnnnnnnnnnnnnnnnnnnnnnnnnnnnnnnnnnnnnnnnnnnnnnnnnnnnnnnnnnnnnnnnnnnnnnnnnnnnnnnnnnnnnnnnnnnnnnnnnnnnnnnnnnnnnnnnnnnnnnnnnnnnnnnnnnnnnnnnnnnnnnnnnnnnnnnnnnnnnnnnnnnnnnnnnnnnnnnnnnnnnnnnnnnnnnnnnnnnnnnnnnnnnnnnnnnnnnnnnnnnnnnnnnnnnnnnnnnnnnnnnnnnnnnnnnnnnnnnnnnnnnnnnnnnnnnnnnnnnnnnnnnnnnnnnnnnnnnnnnnnnnnnnnnnnnnnnnnnnnnnnnnnnnnnnnnnnnnnnnnnnnnnnnnnnnnnnnnnnnnnnnnnnnnnnnnnnnnnnnnnnnnnnnnnnnnnnnnnnnnnnnnnnnnnnnnnnnnnnnnnnnnnnnnnnnnnnnnnnnnnnnnnnnnnnnnnnnnnnnnnnnnnnnnnnnnnnnnnnnnnnnnnnnnnnnnnnnnnnnnnnnnnnnnnnnnnnnnnnnnnnnnnnnnnnnnnnnnnnnnnnnnnnnnnnnnnnnnnnnnnnnnnnnnnnnnnnnnnnnnnnnnnnnnnnnnnnnnnnnnnnnnnnnnnnnnnnnnnnnnnnnnnnnnnnnnnnnnnnnnnnnnnnnnnnnnnnnnnnnnnnnnnnnnnnnnnnnnnnnnnnnnnnnnnnnnnnnnnnnnnnnnnnnnnnnnnnnnnnnnnnnnnnnnnnnnnnnnnnnnnnnnnnnnnnnnnnnnnnnnnnnnnnnnnnnnnnnnnnnnnnnnnnnnnnnnnnnnnnnnnnnnnnnnnnnnnnnnnnnnnnnnnnnnnnnnnnnnnnnnnnnnnnnnnnnnnnnnnnnnnnnnnnnnnnnnnnnnnnnnnnnnnnnnnnnnnnnnnnnnnnnnnnnnnnnnnnnnnnnnnnnnnnnnnnnnnnnnnnnnnnnnnnnnnnnnnnnnnnnnnnnnnnnnnnnnnnnnnnnnnnnnnnnnnnnnnnnnnnnnnnnnnnnnnnnnnnnnnnnnnnnnnnnnnnnnnnnnnnnnnnnnnnnnnnnnnnnnnnnnnnnnnnnnnnnnnnnnnnnnnnnnnnnnnnnnnnnnnnnnnnnnnnnnnnnnnnnnnnnnnnnnnnnnnnnnnnnnnnnnnnnnnnnnnnnnnnnnnnnnnnnnnnnnnnnnnnnnnnnnnnnnnnnnnnnnnnnnnnnnnnnnnnnnnnnnnnnnnnnnnnnnnnnnnnnnnnnnnnnnnnnnnnnnnnnnnnnnnnnnnnnnnnnnnnnnnnnnnnnnnnnnnnnnnnnnnnnnnnnnnnnnnnnnnnnnnnnnnnnnnnnnnnnnnnnnnnnnnnnnnnnnnnnnnnnnnnnnnnnnnnnnnnnnnnnnnnnnnnnnnnnnnnnnnnnnnnnnnnnnnnnnnnnnnnnnnnnnnnnnnnnnnnnnnnnnnnnnnnnnnnnnnnnnnnnnnnnnnnnnnnnnnnnnnnnnnnnnnnnnnnnnnnnnnnnnnnnnnnnnnnnnnnnnnnnnnnnnnnnnnnnnnnnnnnnnnnnnnnnnnnnnnnnnnnnnnnnnnnnnnnnnnnnnnnnnnnnnnnnnnnnnnnnnnnnnnnnnnnnnnnnnnnnnnnnnnnnnnnnnnnnnnnnnnnnnnnnnnnnnnnnnnnnnnnnnnnnnnnnnnnnnnnnnnnnnnnnnnnnnnnnnnnnnnnnnnnnnnnnnnnnnnnnnnnnnnnnnnnnnnnnnnnnnnnnnnnnnnnnnnnnnnnnnnnnnnnnnnnnnnnnnnnnnnnnnnnnnnnnnnnnnnnnnnnnnnnnnnnnnnnnnnnnnnnnnnnnnnnnnnnnnnnnnnnnnnnnnnnnnnnnnnnnnnnnnnnnnnnnnnnnnnnnnnnnnnnnnnnnnnnnnnnnnnnnnnnnnnnnnnnnnnnnnnnnnnnnnnnnnnnnnnnnnnnnnnnnnnnnnnnnnnnnnnnnnnnnnnnnnnnnnnnnnnnnnnnnnnnnnnnnnnnnnnnnnnnnnnnnnnnnnnnnnnnnnnnnnnnnnnnnnnnnnnnnnnnnnnnnnnnnnnnnnnnnnnnnnnnnnnnnnnnnnnnnnnnnnnnnnnnnnnnnnnnnnnnnnnnnnnnnnnnnnnnnnnnnnnnnnnnnnnnnnnnnnnnnnnnnnnnnnnnnnnnnnnnnnnnnnnnnnnnnnnnnnnnnnnnnnnnnnnnnnnnnnnnnnnnnnnnnnnnnnnnnnnnnnnnnnnnnnnnnnnnnnnnnnnnnnnnnnnnnnnnnnnnnnnnnnnnnnnnnnnnnnnnnnnnnnnnnnnnnnnnnnnnnnnnnnnnnnnnnnnnnnnnnnnnnnnnnnnnnnnnnnnnnnnnnnnnnnnnnnnnnnnnnnnnnnnnnnnnnnnnnnnnnnnnnnnnnnnnnnnnnnnnnnnnnnnnnnnnnnnnnnnnnnnnnnnnnnnnnnnnnnnnnnnnnnnnnnnnnnnnnnnnnnnnnnnnnnnnnnnnnnnnnnnnnnnnnnnnnnnnnnnnnnnnnnnnnnnnnnnnnnnnnnnnnnnnnnnnnnnnnnnnnnnnnnnnnnnnnnnnnnnnnnnnnnnnnnnnnnnnnnnnnnnnnnnnnnnnnnnnnnnnnnnnnnnnnnnnnnnnnnnnnnnnnnnnnnnnnnnnnnnnnnnnnnnnnnnnnnnnnnnnnnnnnnnnnnnnnnnnnnnnnnnnnnnnnnnnnnnnnnnnnnnnnnnnnnnnnnnnnnnnnnnnnnnnnnnnnnnnnnnnnnnnnnnnnnnnnnnnnnnnnnnnnnnnnnnnnnnnnnnnnnnnnnnnnnnnnnnnnnnnnnnnnnnnnnnnnnnnnnnnnnnnnnnnnnnnnnnnnnnnnnnnnnnnnnnnnnnnnnnnnnnnnnnnnnnnnnnnnnnnnnnnnnnnnnnnnnnnnnnnnnnnnnnnnnnnnnnnnnnnnnnnnnnnnnnnnnnnnnnnnnnnnnnnnnnnnnnnnnnnnnnnnnnnnnnnnnnnnnnnnnnnnnnnnnnnnnnnnnnnnnnnnnnnnnnnnnnnnnnnnnnnnnnnnnnnnnnnnnnnnnnnnnnnnnnnnnnnnnnnnnnnnnnnnnnnnnnnnnnnnnnnnnnnnnnnnnnnnnnnnnnnnnnnnnnnnnnnnnnnnnnnnnnnnnnnnnnnnnnnnnnnnnnnnnnnnnnnnnnnnnnnnnnnnnnnnnnnnnnnnnnnnnnnnnnnnnnnnnnnnnnnnnnnnnnnnnnnnnnnnnnnnnnnnnnnnnnnnnnnnnnnnnnnnnnnnnnnnnnnnnnnnnnnnnnnnnnnnnnnnnnnnnnnnnnnnnnnnnnnnnnnnnnnnnnnnnnnnnnnnnnnnnnnnnnnnnnnnnnnnnnnnnnnnnnnnnnnnnnnnnnnnnnnnnnnnnnnnnnnnnnnnnnnnnnnnnnnnnnnnnnnnnnnnnnnnnnnnnnnnnnnnnnnnnnnnnnnnnnnnnnnnnnnnnnnnnnnnnnnnnnnnnnnnnnnnnnnnnnnnnnnnnnnnnnnnnnnnnnnnnnnnnnnnnnnnnnnnnnnnnnnnnnnnnnnnnnnnnnnnnnnnnnnnnnnnnnnnnnnnnnnnnnnnnnnnnnnnnnnnnnnnnnnnnnnnnnnnnnnnnnnnnnnnnnnnnnnnnnnnnnnnnnnnnnnnnnnnnnnnnnnnnnnnnnnnnnnnnnnnnnnnnnnnnnnnnnnnnnnnnnnnnnnnnnnnnnnnnnnnnnnnnnnnnnnnnnnnnnnnnnnnnnnnnnnnnnnnnnnnnnnnnnnnnnnnnnnnnnnnnnnnnnnnnnnnnnnnnnnnnnnnnnnnnnnnnnnnnnnnnnnnnnnnnnnnnnnnnnnnnnnnnnnnnnnnnnnnnnnnnnnnnnnnnnnnnnnnnnnnnnnnnnnnnnnnnnnnnnnnnnnnnnnnnnnnnnnnnnnnnnnnnnnnnnnnnnnnnnnnnnnnnnnnnnnnnnnnnnnnnnnnnnnnnnnnnnnnnnnnnnnnnnnnnnnnnnnnnnnnnnnnnnnnnnnnnnnnnnnnnnnnnnnnnnnnnnnnnnnnnnnnnnnnnnnnnnnnnnnnnnnnnnnnnnnnnnnnnnnnnnnnnnnnnnnnnnnnnnnnnnnnnnnnnnnnnnnnnnnnnnnnnnnnnnnnnnnnnnnnnnnnnnnnnnnnnnnnnnnnnnnnnnnnnnnnnnnnnnnnnnnnnnnnnnnnnnnnnnnnnnnnnnnnnnnnnnnnnnnnnnnnnnnnnnnnnnnnnnnnnnnnnnnnnnnnnnnnnnnnnnnnnnnnnnnnnnnnnnnnnnnnnnnnnnnnnnnnnnnnnnnnnnnnnnnnnnnnnnnnnnnnnnnnnnnnnnnnnnnnnnnnnnnnnnnnnnnnnnnnnnnnnnnnnnnnnnnnnnnnnnnnnnnnnnnnnnnnnnnnnnnnnnnnnnnnnnnnnnnnnnnnnnnnnnnnnnnnnnnnnnnnnnnnnnnnnnnnnnnnnnnnnnnnnnnnnnnnnnnnnnnnnnnnnnnnnnnnnnnnnnnnnnnnnnnnnnnnnnnnnnnnnnnnnnnnnnnnnnnnnnnnnnnnnnnnnnnnnnnnnnnnnnnnnnnnnnnnnnnnnnnnnnnnnnnnnnnnnnnnnnnnnnnnnnnnnnnnnnnnnnnnnnnnnnnnnnnnnnnnnnnnnnnnnnnnnnnnnnnnnnnnnnnnnnnnnnnnnnnnnnnnnnnnnnnnnnnnnnnnnnnnnnnnnnnnnnnnnnnnnnnnnnnnnnnnnnnnnnnnnnnnnnnnnnnnnnnnnnnnnnnnnnnnnnnnnnnnnnnnnnnnnnnnnnnnnnnnnnnnnnnnnnnnnnnnnnnnnnnnnnnnnnnnnnnnnnnnnnnnnnnnnnnnnnnnnnnnnnnnnnnnnnnnnnnnnnnnnnnnnnnnnnnnnnnnnnnnnnnnnnnnnnnnnnnnnnnnnnnnnnnnnnnnnnnnnnnnnnnnnnnnnnnnnnnnnnnnnnnnnnnnnnnnnnnnnnnnnnnnnnnnnnnnnnnnnnnnnnnnnnnnnnnnnnnnnnnnnnnnnnnnnnnnnnnnnnnnnnnnnnnnnnnnnnnnnnnnnnnnnnnnnnnnnnnnnnnnnnnnnnnnnnnnnnnnnnnnnnnnnnnnnnnnnnnnnnnnnnnnnnnnnnnnnnnnnnnnnnnnnnnnnnnnnnnnnnnnnnnnnnnnnnnnnnnnnnnnnnnnnnnnnnnnnnnnnnnnnnnnnnnnnnnnnnnnnnnnnnnnnnnnnnnnnnnnnnnnnnnnnnnnnnnnnnnnnnnnnnnnnnnnnnnnnnnnnnnnnnnnnnnnnnnnnnnnnnnnnnnnnnnnnnnnnnnnnnnnnnnnnnnnnnnnnnnnnnnnnnnnnnnnnnnnnnnnnnnnnnnnnnnnnnnnnnnnnnnnnnnnnnnnnnnnnnnnnnnnnnnnnnnnnnnnnnnnnnnnnnnnnnnnnnnnnnnnnnnnnnnnnnnnnnnnnnnnnnnnnnnnnnnnnnnnnnnnnnnnnnnnnnnnnnnnnnnnnnnnnnnnnnnnnnnnnnnnnnnnnnnnnnnnnnnnnnnnnnnnnnnnnnnnnnnnnnnnnnnnnnnnnnnnnnnnnnnnnnnnnnnnnnnnnnnnnnnnnnnnnnnnnnnnnnnnnnnnnnnnnnnnnnnnnnnnnnnnnnnnnnnnnnnnnnnnnnnnnnnnnnnnnnnnnnnnnnnnnnnnnnnnnnnnnnnnnnnnnnnnnnnnnnnnnnnnnnnnnnnnnnnnnnnnnnnnnnnnnnnnnnnnnnnnnnnnnnnnnnnnnnnnnnnnnnnnnnnnnnnnnnnnnnnnnnnnnnnnnnnnnnnnnnnnnnnnnnnnnnnnnnnnnnnnnnnnnnnnnnnnnnnnnnnnnnnnnnnnnnnnnnnnnnnnnnnnnnnnnnnnnnnnnnnnnnnnnnnnnnnnnnnnnnnnnnnnnnnnnnnnnnnnnnnnnnnnnnnnnnnnnnnnnnnnnnnnnnnnnnnnnnnnnnnnnnnnnnnnnnnnnnnnnnnnnnnnnnnnnnnnnnnnnnnnnnnnnnnnnnnnnnnnnnnnnnnnnnnnnnnnnnnnnnnnnnnnnnnnnnnnnnnnnnnnnnnnnnnnnnnnnnnnnnnnnnnnnnnnnnnnnnnnnnnnnnnnnnnnnnnnnnnnnnnnnnnnnnnnnnnnnnnnnnnnnnnnnnnnnnnnnnnnnnnnnnnnnnnnnnnnnnnnnnnnnnnnnnnnnnnnnnnnnnnnnnnnnnnnnnnnnnnnnnnnnnnnnnnnnnnnnnnnnnnnnnnnnnnnnnnnnnnnnnnnnnnnnnnnnnnnnnnnnnnnnnnnnnnnnnnnnnnnnnnnnnnnnnnnnnnnnnnnnnnnnnnnnnnnnnnnnnnnnnnnnnnnnnnnnnnnnnnnnnnnnnnnnnnnnnnnnnnnnnnnnnnnnnnnnnnnnnnnnnnnnnnnnnnnnnnnnnnnnnnnnnnnnnnnnnnnnnnnnnnnnnnnnnnnnnnnnnnnnnnnnnnnnnnnnnnnnnnnnnnnnnnnnnnnnnnnnnnnnnnnnnnnnnnnnnnnnnnnnnnnnnnnnnnnnnnnnnnnnnnnnnnnnnnnnnnnnnnnnnnnnnnnnnnnnnnnnnnnnnnnnnnnnnnnnnnnnnnnnnnnnnnnnnnnnnnnnnnnnnnnnnnnnnnnnnnnnnnnnnnnnnnnnnnnnnnnnnnnnnnnnnnnnnnnnnnnnnnnnnnnnnnnnnnnnnnnnnnnnnnnnnnnnnnnnnnnnnnnnnnnnnnnnnnnnnnnnnnnnnnnnnnnnnnnnnnnnnnnnnnnnnnnnnnnnnnnnnnnnnnnnnnnnnnnnnnnnnnnnnnnnnnnnnnnnnnnnnnnnnnnnnnnnnnnnnnnnnnnnnnnnnnnnnnnnnnnnnnnnnnnnnnnnnnnnnnnnnnnnnnnnnnnnnnnnnnnnnnnnnnnnnnnnnnnnnnnnnnnnnnnnnnnnnnnnnnnnnnnnnnnnnnnnnnnnnnnnnnnnnnnnnnnnnnnnnnnnnnnnnnnnnnnnnnnnnnnnnnnnnnnnnnnnnnnnnnnnnnnnnnnnnnnnnnnnnnnnnnnnnnnnnnnnnnnnnnnnnnnnnnnnnnnnnnnnnnnnnnnnnnnnnnnnnnnnnnnnnnnnnnnnnnnnnnnnnnnnnnnnnnnnnnnnnnnnnnnnnnnnnnnnnnnnnnnnnnnnnnnnnnnnnnnnnnnnnnnnnnnnnnnnnnnnnnnnnnnnnnnnnnnnnnnnnnnnnnnnnnnnnnnnnnnnnnnnnnnnnnnnnnnnnnnnnnnnnnnnnnnnnnnnnnnnnnnnnnnnnnnnnnnnnnnnnnnnnnnnnnnnnnnnnnnnnnnnnnnnnnnnnnnnnnnnnnnnnnnnnnnnnnnnnnnnnnnnnnnnnnnnnnnnnnnnnnnnnnnnnnnnnnnnnnnnnnnnnnnnnnnnnnnnnnnnnnnnnnnnnnnnnnnnnnnnnnnnnnnnnnnnnnnnnnnnnnnnnnnnnnnnnnnnnnnnnnnnnnnnnnnnnnnnnnnnnnnnnnnnnnnnnnnnnnnnnnnnnnnnnnnnnnnnnnnnnnnnnnnnnnnnnnnnnnnnnnnnnnnnnnnnnnnnnnnnnnnnnnnnnnnnnnnnnnnnnnnnnnnnnnnnnnnnnnnnnnnnnnnnnnnnnnnnnnnnnnnnnnnnnnnnnnnnnnnnnnnnnnnnnnnnnnnnnnnnnnnnnnnnnnnnnnnnnnnnnnnnnnnnnnnnnnnnnnnnnnnnnnnnnnnnnnnnnnnnnnnnnnnnnnnnnnnnnnnnnnnnnnnnnnnnnnnnnnnnnnnnnnnnnnnnnnnnnnnnnnnnnnnnnnnnnnnnnnnnnnnnnnnnnnnnnnnnnnnnnnnnnnnnnnnnnnnnnnnnnnnnnnnnnnnnnnnnnnnnnnnnnnnnnnnnnnnnnnnnnnnnnnnnnnnnnnnnnnnnnnnnnnnnnnnnnnnnnnnnnnnnnnnnnnnnnnnnnnnnnnnnnnnnnnnnnnnnnnnnnnnnnnnnnnnnnnnnnnnnnnnnnnnnnnnnnnnnnnnnnnnnnnnnnnnnnnnnnnnnnnnnnnnnnnnnnnnnnnnnnnnnnnnnnnnnnnnnnnnnnnnnnnnnnnnnnnnnnnnnnnnnnnnnnnnnnnnnnnnnnnnnnnnnnnnnnnnnnnnnnnnnnnnnnnnnnnnnnnnnnnnnnnnnnnnnnnnnnnnnnnnnnnnnnnnnnnnnnnnnnnnnnnnnnnnnnnnnnnnnnnnnnnnnnnnnnnnnnnnnnnnnnnnnnnnnnnnnnnnnnnnnnnnnnnnnnnnnnnnnnnnnnnnnnnnnnnnnnnnnnnnnnnnnnnnnnnnnnnnnnnnnnnnnnnnnnnnnnnnnnnnnnnnnnnnnnnnnnnnnnnnnnnnnnnnnnnnnnnnnnnnnnnnnnnnnnnnnnnnnnnnnnnnnnnnnnnnnnnnnnnnnnnnnnnnnnnnnnnnnnnnnnnnnnnnnnnnnnnnnnnnnnnnnnnnnnnnnnnnnnnnnnnnnnnnnnnnnnnnnnnnnnnnnnnnnnnnnnnnnnnnnnnnnnnnnnnnnnnnnnnnnnnnnnnnnnnnnnnnnnnnnnnnnnnnnnnnnnnnnnnnnnnnnnnnnnnnnnnnnnnnnnnnnnnnnnnnnnnnnnnnnnnnnnnnnnnnnnnnnnnnnnnnnnnnnnnnnnnnnnnnnnnnnnnnnnnnnnnnnnnnnnnnnnnnnnnnnnnnnnnnnnnnnnnnnnnnnnnnnnnnnnnnnnnnnnnnnnnnnnnnnnnnnnnnnnnnnnnnnnnnnnnnnnnnnnnnnnnnnnnnnnnnnnnnnnnnnnnnnnnnnnnnnnnnnnnnnnnnnnnnnnnnnnnnnnnnnnnnnnnnnnnnnnnnnnnnnnnnnnnnnnnnnnnnnnnnnnnnnnnnnnnnnnnnnnnnnnnnnnnnnnnnnnnnnnnnnnnnnnnnnnnnnnnnnnnnnnnnnnnnnnnnnnnnnnnnnnnnnnnnnnnnnnnnnnnnnnnnnnnnnnnnnnnnnnnnnnnnnnnnnnnnnnnnnnnnnnnnnnnnnnnnnnnnnnnnnnnnnnnnnnnnnnnnnnnnnnnnnnnnnnnnnnnnnnnnnnnnnnnnnnnnnnnnnnnnnnnnnnnnnnnnnnnnnnnnnnnnnnnnnnnnnnnnnnnnnnnnnnnnnnnnnnnnnnnnnnnnnnnnnnnnnnnnnnnnnnnnnnnnnnnnnnnnnnnnnnnnnnnnnnnnnnnnnnnnnnnnnnnnnnnnnnnnnnnnnnnnnnnnnnnnnnnnnnnnnnnnnnnnnnnnnnnnnnnnnnnnnnnnnnnnnnnnnnnnnnnnnnnnnnnnnnnnnnnnnnnnnnnnnnnnnnnnnnnnnnnnnnnnnnnnnnnnnnnnnnnnnnnnnnnnnnnnnnnnnnnnnnnnnnnnnnnnnnnnnnnnnnnnnnnnnnnnnnnnnnnnnnnnnnnnnnnnnnnnnnnnnnnnnnnnnnnnnnnnnnnnnnnnnnnnnnnnnnnnnnnnnnnnnnnnnnnnnnnnnnnnnnnnnnnnnnnnnnnnnnnnnnnnnnnnnnnnnnnnnnnnnnnnnnnnnnnnnnnnnnnnnnnnnnnnnnnnnnnnnnnnnnnnnnnnnnnnnnnnnnnnnnnnnnnnnnnnnnnnnnnnnnnnnnnnnnnnnnnnnnnnnnnnnnnnnnnnnnnnnnnnnnnnnnnnnnnnnnnnnnnnnnnnnnnnnnnnnnnnnnnnnnnnnnnnnnnnnnnnnnnnnnnnnnnnnnnnnnnnnnnnnnnnnnnnnnnnnnnnnnnnnnnnnnnnnnnnnnnnnnnnnnnnnnnnnnnnnnnnnnnnnnnnnnnnnnnnnnnnnnnnnnnnnnnnnnnnnnnnnnnnnnnnnnnnnnnnnnnnnnnnnnnnnnnnnnnnnnnnnnnnnnnnnnnnnnnnnnnnnnnnnnnnnnnnnnnnnnnnnnnnnnnnnnnnnnnnnnnnnnnnnnnnnnnnnnnnnnnnnnnnnnnnnnnnnnnnnnnnnnnnnnnnnnnnnnnnnnnnnnnnnnnnnnnnnnnnnnnnnnnnnnnnnnnnnnnnnnnnnnnnnnnnnnnnnnnnnnnnnnnnnnnnnnnnnnnnnnnnnnnnnnnnnnnnnnnnnnnnnnnnnnnnnnnnnnnnnnnnnnnnnnnnnnnnnnnnnnnnnnnnnnnnnnnnnnnnnnnnnnnnnnnnnnnnnnnnnnnnnnnnnnnnnnnnnnnnnnnnnnnnnnnnnnnnnnnnnnnnnnnnnnnnnnnnnnnnnnnnnnnnnnnnnnnnnnnnnnnnnnnnnnnnnnnnnnnnnnnnnnnnnnnnnnnnnnnnnnnnnnnnnnnnnnnnnnnnnnnnnnnnnnnnnnnnnnnnnnnnnnnnnnnnnnnnnnnnnnnnnnnnnnnnnnnnnnnnnnnnnnnnnnnnnnnnnnnnnnnnnnnnnnnnnnnnnnnnnnnnnnnnnnnnnnnnnnnnnnnnnnnnnnnnnnnnnnnnnnnnnnnnnnnnnnnnnnnnnnnnnnnnnnnnnnnnnnnnnnnnnnnnnnnnnnnnnnnnnnnnnnnnnnnnnnnnnnnnnnnnnnnnnnnnnnnnnnnnnnnnnnnnnnnnnnnnnnnnnnnnnnnnnnnnnnnnnnnnnnnnnnnnnnnnnnnnnnnnnnnnnnnnnnnnnnnnnnnnnnnnnnnnnnnnnnnnnnnnnnnnnnnnnnnnnnnnnnnnnnnnnnnnnnnnnnnnnnnnnnnnnnnnnnnnnnnnnnnnnnnnnnnnnnnnnnnnnnnnnnnnnnnnnnnnnnnnnnnnnnnnnnnnnnnnnnnnnnnnnnnnnnnnnnnnnnnnnnnnnnnnnnnnnnnnnnnnnnnnnnnnnnnnnnnnnnnnnnnnnnnnnnnnnnnnnnnnnnnnnnnnnnnnnnnnnnnnnnnnnnnnnnnnnnnnnnnnnnnnnnnnnnnnnnnnnnnnnnnnnnnnnnnnnnnnnnnnnnnnnnnnnnnnnnnnnnnnnnnnnnnnnnnnnnnnnnnnnnnnnnnnnnnnnnnnnnnnnnnnnnnnnnnnnnnnnnnnnnnnnnnnnnnnnnnnnnnnnnnnnnnnnnnnnnnnnnnnnnnnnnnnnnnnnnnnnnnnnnnnnnnnnnnnnnnnnnnnnnnnnnnnnnnnnnnnnnnnnnnnnnnnnnnnnnnnnnnnnnnnnnnnnnnnnnnnnnnnnnnnnnnnnnnnnnnnnnnnnnnnnnnnnnnnnnnnnnnnnnnnnnnnnnnnnnnnnnnnnnnnnnnnnnnnnnnnnnnnnnnnnnnnnnnnnnnnnnnnnnnnnnnnnnnnnnnnnnnnnnnnnnnnnnnnnnnnnnnnnnnnnnnnnnnnnnnnnnnnnnnnnnnnnnnnnnnnnnnnnnnnnnnnnnnnnnnnnnnnnnnnnnnnnnnnnnnnnnnnnnnnnnnnnnnnnnnnnnnnnnnnnnnnnnnnnnnnnnnnnnnnnnnnnnnnnnnnnnnnnnnnnnnnnnnnnnnnnnnnnnnnnnnnnnnnnnnnnnnnnnnnnnnnnnnnnnnnnnnnnnnnnnnnnnnnnnnnnnnnnnnnnnnnnnnnnnnnnnnnnnnnnnnnnnnnnnnnnnnnnnnnnnnnnnnnnnnnnnnnnnnnnnnnnnnnnnnnnnnnnnnnnnnnnnnnnnnnnnnnnnnnnnnnnnnnnnnnnnnnnnnnnnnnnnnnnnnnnnnnnnnnnnnnnnnnnnnnnnnnnnnnnnnnnnnnnnnnnnnnnnnnnnnnnnnnnnnnnnnnnnnnnnnnnnnnnnnnnnnnnnnnnnnnnnnnnnnnnnnnnnnnnnnnnnnnnnnnnnnnnnnnnnnnnnnnnnnnnnnnnnnnnnnnnnnnnnnnnnnnnnnnnnnnnnnnnnnnnnnnnnnnnnnnnnnnnnnnnnnnnnnnnnnnnnnnnnnnnnnnnnnnnnnnnnnnnnnnnnnnnnnnnnnnnnnnnnnnnnnnnnnnnnnnnnnnnnnnnnnnnnnnnnnnnnnnnnnnnnnnnnnnnnnnnnnnnnnnnnnnnnnnnnnnnnnnnnnnnnnnnnnnnnnnnnnnnnnnnnnnnnnnnnnnnnnnnnnnnnnnnnnnnnnnnnnnnnnnnnnnnnnnnnnnnnnnnnnnnnnnnnnnnnnnnnnnnnnnnnnnnnnnnnnnnnnnnnnnnnnnnnnnnnnnnnnnnnnnnnnnnnnnnnnnnnnnnnnnnnnnnnnnnnnnnnnnnnnnnnnnnnnnnnnnnnnnnnnnnnnnnnnnnnnnnnnnnnnnnnnnnnnnnnnnnnnnnnnnnnnnnnnnnnnnnnnnnnnnnnnnnnnnnnnnnnnnnnnnnnnnnnnnnnnnnnnnnnnnnnnnnnnnnnnnnnnnnnnnnnnnnnnnnnnnnnnnnnnnnnnnnnnnnnnnnnnnnnnnnnnnnnnnnnnnnnnnnnnnnnnnnnnnnnnnnnnnnnnnnnnnnnnnnnnnnnnnnnnnnnnnnnnnnnnnnnnnnnnnnnnnnnnnnnnnnnnnnnnnnnnnnnnnnnnnnnnnnnnnnnnnnnnnnnnnnnnnnnnnnnnnnnnnnnnnnnnnnnnnnnnnnnnnnnnnnnnnnnnnnnnnnnnnnnnnnnnnnnnnnnnnnnnnnnnnnnnnnnnnnnnnnnnnnnnnnnnnnnnnnnnnnnnnnnnnnnnnnnnnnnnnnnnnnnnnnnnnnnnnnnnnnnnnnnnnnnnnnnnnnnnnnnnnnnnnnnnnnnnnnnnnnnnnnnnnnnnnnnnnnnnnnnnnnnnnnnnnnnnnnnnnnnnnnnnnnnnnnnnnnnnnnnnnnnnnnnnnnnnnnnnnnnnnnnnnnnnnnnnnnnnnnnnnnnnnnnnnnnnnnnnnnnnnnnnnnnnnnnnnnnnnnnnnnnnnnnnnnnnnnnnnnnnnnnnnnnnnnnnnnnnnnnnnnnnnnnnnnnnnnnnnnnnnnnnnnnnnnnnnnnnnnnnnnnnnnnnnnnnnnnnnnnnnnnnnnnnnnnnnnnnnnnnnnnnnnnnnnnnnnnnnnnnnnnnnnnnnnnnnnnnnnnnnnnnnnnnnnnnnnnnnnnnnnnnnnnnnnnnnnnnnnnnnnnnnnnnnnnnnnnnnnnnnnnnnnnnnnnnnnnnnnnnnnnnnnnnnnnnnnnnnnnnnnnnnnnnnnnnnnnnnnnnnnnnnnnnnnnnnnnnnnnnnnnnnnnnnnnnnnnnnnnnnnnnnnnnnnnnnnnnnnnnnnnnnnnnnnnnnnnnnnnnnnnnnnnnnnnnnnnnnnnnnnnnnnnnnnnnnnnnnnnnnnnnnnnnnnnnnnnnnnnnnnnnnnnnnnnnnnnnnnnnnnnnnnnnnnnnnnnnnnnnnnnnnnnnnnnnnnnnnnnnnnnnnnnnnnnnnnnnnnnnnnnnnnnnnnnnnnnnnnnnnnnnnnnnnnnnnnnnnnnnnnnnnnnnnnnnnnnnnnnnnnnnnnnnnnnnnnnnnnnnnnnnnnnnnnnnnnnnnnnnnnnnnnnnnnnnnnnnnnnnnnnnnnnnnnnnnnnnnnnnnnnnnnnnnnnnnnnnnnnnnnnnnnnnnnnnnnnnnnnnnnnnnnnnnnnnnnnnnnnnnnnnnnnnnnnnnnnnnnnnnnnnnnnnnnnnnnnnnnnnnnnnnnnnnnnnnnnnnnnnnnnnnnnnnnnnnnnnnnnnnnnnnnnnnnnnnnnnnnnnnnnnnnnnnnnnnnnnnnnnnnnnnnnnnnnnnnnnnnnnnnnnnnnnnnnnnnnnnnnnnnnnnnnnnnnnnnnnnnnnnnnnnnnnnnnnnnnnnnnnnnnnnnnnnnnnnnnnnnnnnnnnnnnnnnnnnnnnnnnnnnnnnnnnnnnnnnnnnnnnnnnnnnnnnnnnnnnnnnnnnnnnnnnnnnnnnnnnnnnnnnnnnnnnnnnnnnnnnnnnnnnnnnnnnnnnnnnnnnnnnnnnnnnnnnnnnnnnnnnnnnnnnnnnnnnnnnnnnnnnnnnnnnnnnnnnnnnnnnnnnnnnnnnnnnnnnnnnnnnnnnnnnnnnnnnnnnnnnnnnnnnnnnnnnnnnnnnnnnnnnnnnnnnnnnnnnnnnnnnnnnnnnnnnnnnnnnnnnnnnnnnnnnnnnnnnnnnnnnnnnnnnnnnnnnnnnnnnnnnnnnnnnnnnnnnnnnnnnnnnnnnnnnnnnnnnnnnnnnnnnnnnnnnnnnnnnnnnnnnnnnnnnnnnnnnnnnnnnnnnnnnnnnnnnnnnnnnnnnnnnnnnnnnnnnnnnnnnnnnnnnnnnnnnnnnnnnnnnnnnnnnnnnnnnnnnnnnnnnnnnnnnnnnnnnnnnnnnnnnnnnnnnnnnnnnnnnnnnnnnnnnnnnnnnnnnnnnnnnnnnnnnnnnnnnnnnnnnnnnnnnnnnnnnnnnnnnnnnnnnnnnnnnnnnnnnnnnnnnnnnnnnnnnnnnnnnnnnnnnnnnnnnnnnnnnnnnnnnnnnnnnnnnnnnnnnnnnnnnnnnnnnnnnnnnnnnnnnnnnnnnnnnnnnnnnnnnnnnnnnnnnnnnnnnnnnnnnnnnnnnnnnnnnnnnnnnnnnnnnnnnnnnnnnnnnnnnnnnnnnnnnnnnnnnnnnnnnnnnnnnnnnnnnnnnnnnnnnnnnnnnnnnnnnnnnnnnnnnnnnnnnnnnnnnnnnnnnnnnnnnnnnnnnnnnnnnnnnnnnnnnnnnnnnnnnnnnnnnnnnnnnnnnnnnnnnnnnnnnnnnnnnnnnnnnnnnnnnnnnnnnnnnnnnnnnnnnnnnnnnnnnnnnnnnnnnnnnnnnnnnnnnnnnnnnnnnnnnnnnnnnnnnnnnnnnnnnnnnnnnnnnnnnnnnnnnnnnnnnnnnnnnnnnnnnnnnnnnnnnnnnnnnnnnnnnnnnnnnnnnnnnnnnnnnnnnnnnnnnnnnnnnnnnnnnnnnnnnnnnnnnnnnnnnnnnnnnnnnnnnnnnnnnnnnnnnnnnnnnnnnnnnnnnnnnnnnnnnnnnnnnnnnnnnnnnnnnnnnnnnnnnnnnnnnnnnnnnnnnnnnnnnnnnnnnnnnnnnnnnnnnnnnnnnnnnnnnnnnnnnnnnnnnnnnnnnnnnnnnnnnnnnnnnnnnnnnnnnnnnnnnnnnnnnnnnnnnnnnnnnnnnnnnnnnnnnnnnnnnnnnnnnnnnnnnnnnnnnnnnnnnnnnnnnnnnnnnnnnnnnnnnnnnnnnnnnnnnnnnnnnnnnnnnnnnnnnnnnnnnnnnnnnnnnnnnnnnnnnnnnnnnnnnnnnnnnnnnnnnnnnnnnnnnnnnnnnnnnnnnnnnnnnnnnnnnnnnnnnnnnnnnnnnnnnnnnnnnnnnnnnnnnnnnnnnnnnnnnnnnnnnnnnnnnnnnnnnnnnnnnnnnnnnnnnnnnnnnnnnnnnnnnnnnnnnnnnnnnnnnnnnnnnnnnnnnnnnnnnnnnnnnnnnnnnnnnnnnnnnnnnnnnnnnnnnnnnnnnnnnnnnnnnnnnnnnnnnnnnnnnnnnnnnnnnnnnnnnnnnnnnnnnnnnnnnnnnnnnnnnnnnnnnnnnnnnnnnnnnnnnnnnnnnnnnnnnnnnnnnnnnnnnnnnnnnnnnnnnnnnnnnnnnnnnnnnnnnnnnnnnnnnnnnnnnnnnnnnnnnnnnnnnnnnnnnnnnnnnnnnnnnnnnnnnnnnnnnnnnnnnnnnnnnnnnnnnnnnnnnnnnnnnnnnnnnnnnnnnnnnnnnnnnnnnnnnnnnnnnnnnnnnnnnnnnnnnnnnnnnnnnnnnnnnnnnnnnnnnnnnnnnnnnnnnnnnnnnnnnnnnnnnnnnnnnnnnnnnnnnnnnnnnnnnnnnnnnnnnnnnnnnnnnnnnnnnnnnnnnnnnnnnnnnnnnnnnnnnnnnnnnnnnnnnnnnnnnnnnnnnnnnnnnnnnnnnnnnnnnnnnnnnnnnnnnnnnnnnnnnnnnnnnnnnnnnnnnnnnnnnnnnnnnnnnnnnnnnnnnnnnnnnnnnnnnnnnnnnnnnnnnnnnnnnnnnnnnnnnnnnnnnnnnnnnnnnnnnnnnnnnnnnnnnnnnnnnnnnnnnnnnnnnnnnnnnnnnnnnnnnnnnnnnnnnnnnnnnnnnnnnnnnnnnnnnnnnnnnnnnnnnnnnnnnnnnnnnnnnnnnnnnnnnnnnnnnnnnnnnnnnnnnnnnnnnnnnnnnnnnnnnnnnnnnnnnnnnnnnnnnnnnnnnnnnnnnnnnnnnnnnnnnnnnnnnnnnnnnnnnnnnnnnnnnnnnnnnnnnnnnnnnnnnnnnnnnnnnnnnnnnnnnnnnnnnnnnnnnnnnnnnnnnnnnnnnnnnnnnnnnnnnnnnnnnnnnnnnnnnnnnnnnnnnnnnnnnnnnnnnnnnnnnnnnnnnnnnnnnnnnnnnnnnnnnnnnnnnnnnnnnnnnnnnnnnnnnnnnnnnnnnnnnnnnnnnnnnnnnnnnnnnnnnnnnnnnnnnnnnnnnnnnnnnnnnnnnnnnnnnnnnnnnnnnnnnnnnnnnnnnnnnnnnnnnnnnnnnnnnnnnnnnnnnnnnnnnnnnnnnnnnnnnnnnnnnnnnnnnnnnnnnnnnnnnnnnnnnnnnnnnnnnnnnnnnnnnnnnnnnnnnnnnnnnnnnnnnnnnnnnnnnnnnnnnnnnnnnnnnnnnnnnnnnnnnnnnnnnnnnnnnnnnnnnnnnnnnnnnnnnnnnnnnnnnnnnnnnnnnnnnnnnnnnnnnnnnnnnnnnnnnnnnnnnnnnnnnnnnnnnnnnnnnnnnnnnnnnnnnnnnnnnnnnnnnnnnnnnnnnnnnnnnnnnnnnnnnnnnnnnnnnnnnnnnnnnnnnnnnnnnnnnnnnnnnnnnnnnnnnnnnnnnnnnnnnnnnnnnnnnnnnnnnnnnnnnnnnnnnnnnnnnnnnnnnnnnnnnnnnnnnnnnnnnnnnnnnnnnnnnnnnnnnnnnnnnnnnnnnnnnnnnnnnnnnnnnnnnnnnnnnnnnnnnnnnnnnnnnnnnnnnnnnnnnnnnnnnnnnnnnnnnnnnnnnnnnnnnnnnnnnnnnnnnnnnnnnnnnnnnnnnnnnnnnnnnnnnnnnnnnnnnnnnnnnnnnnnnnnnnnnnnnnnnnnnnnnnnnnnnnnnnnnnnnnnnnnnnnnnnnnnnnnnnnnnnnnnnnnnnnnnnnnnnnnnnnnnnnnnnnnnnnnnnnnnnnnnnnnnnnnnnnnnnnnnnnnnnnnnnnnnnnnnnnnnnnnnnnnnnnnnnnnnnnnnnnnnnnnnnnnnnnnnnnnnnnnnnnnnnnnnnnnnnnnnnnnnnnnnnnnnnnnnnnnnnnnnnnnnnnnnnnnnnnnnnnnnnnnnnnnnnnnnnnnnnnnnnnnnnnnnnnnnnnnnnnnnnnnnnnnnnnnnnnnnnnnnnnnnnnnnnnnnnnnnnnnnnnnnnnnnnnnnnnnnnnnnnnnnnnnnnnnnnnnnnnnnnnnnnnnnnnnnnnnnnnnnnnnnnnnnnnnnnnnnnnnnnnnnnnnnnnnnnnnnnnnnnnnnnnnnnnnnnnnnnnnnnnnnnnnnnnnnnnnnnnnnnnnnnnnnnnnnnnnnnnnnnnnnnnnnnnnnnnnnnnnnnnnnnnnnnnnnnnnnnnnnnnnnnnnnnnnnnnnnnnnnnnnnnnnnnnnnnnnnnnnnnnnnnnnnnnnnnnnnnnnnnnnnnnnnnnnnnnnnnnnnnnnnnnnnnnnnnnnnnnnnnnnnnnnnnnnnnnnnnnnnnnnnnnnnnnnnnnnnnnnnnnnnnnnnnnnnnnnnnnnnnnnnnnnnnnnnnnnnnnnnnnnnnnnnnnnnnnnnnnnnnnnnnnnnnnnnnnnnnnnnnnnnnnnnnnnnnnnnnnnnnnnnnnnnnnnnnnnnnnnnnnnnnnnnnnnnnnnnnnnnnnnnnnnnnnnnnnnnnnnnnnnnnnnnnnnnnnnnnnnnnnnnnnnnnnnnnnnnnnnnnnnnnnnnnnnnnnnnnnnnnnnnnnnnnnnnnnnnnnnnnnnnnnnnnnnnnnnnnnnnnnnnnnnnnnnnnnnnnnnnnnnnnnnnnnnnnnnnnnnnnnnnnnnnnnnnnnnnnnnnnnnnnnnnnnnnnnnnnnnnnnnnnnnnnnnnnnnnnnnnnnnnnnnnnnnnnnnnnnnnnnnnnnnnnnnnnnnnnnnnnnnnnnnnnnnnnnnnnnnnnnnnnnnnnnnnnnnnnnnnnnnnnnnnnnnnnnnnnnnnnnnnnnnnnnnnnnnnnnnnnnnnnnnnnnnnnnnnnnnnnnnnnnnnnnnnnnnnnnnnnnnnnnnnnnnnnnnnnnnnnnnnnnnnnnnnnnnnnnnnnnnnnnnnnnnnnnnnnnnnnnnnnnnnnnnnnnnnnnnnnnnnnnnnnnnnnnnnnnnnnnnnnnnnnnnnnnnnnnnnnnnnnnnnnnnnnnnnnnnnnnnnnnnnnnnnnnnnnnnnnnnnnnnnnnnnnnnnnnnnnnnnnnnnnnnnnnnnnnnnnnnnnnnnnnnnnnnnnnnnnnnnnnnnnnnnnnnnnnnnnnnnnnnnnnnnnnnnnnnnnnnnnnnnnnnnnnnnnnnnnnnnnnnnnnnnnnnnnnnnnnnnnnnnnnnnnnnnnnnnnnnnnnnnnnnnnnnnnnnnnnnnnnnnnnnnnnnnnnnnnnnnnnnnnnnnnnnnnnnnnnnnnnnnnnnnnnnnnnnnnnnnnnnnnnnnnnnnnnnnnnnnnnnnnnnnnnnnnnnnnnnnnnnnnnnnnnnnnnnnnnnnnnnnnnnnnnnnnnnnnnnnnnnnnnnnnnnnnnnnnnnnnnnnnnnnnnnnnnnnnnnnnnnnnnnnnnnnnnnnnnnnnnnnnnnnnnnnnnnnnnnnnnnnnnnnnnnnnnnnnnnnnnnnnnnnnnnnnnnnnnnnnnnnnnnnnnnnnnnnnnnnnnnnnnnnnnnnnnnnnnnnnnnnnnnnnnnnnnnnnnnnnnnnnnnnnnnnnnnnnnnnnnnnnnnnnnnnnnnnnnnnnnnnnnnnnnnnnnnnnnnnnnnnnnnnnnnnnnnnnnnnnnnnnnnnnnnnnnnnnnnnnnnnnnnnnnnnnnnnnnnnnnnnnnnnnnnnnnnnnnnnnnnnnnnnnnnnnnnnnnnnnnnnnnnnnnnnnnnnnnnnnnnnnnnnnnnnnnnnnnnnnnnnnnnnnnnnnnnnnnnnnnnnnnnnnnnnnnnnnnnnnnnnnnnnnnnnnnnnnnnnnnnnnnnnnnnnnnnnnnnnnnnnnnnnnnnnnnnnnnnnnnnnnnnnnnnnnnnnnnnnnnnnnnnnnnnnnnnnnnnnnnnnnnnnnnnnnnnnnnnnnnnnnnnnnnnnnnnnnnnnnnnnnnnnnnnnnnnnnnnnnnnnnnnnnnnnnnnnnnnnnnnnnnnnnnnnnnnnnnnnnnnnnnnnnnnnnnnnnnnnnnnnnnnnnnnnnnnnnnnnnnnnnnnnnnnnnnnnnnnnnnnnnnnnnnnnnnnnnnnnnnnnnnnnnnnnnnnnnnnnnnnnnnnnnnnnnnnnnnnnnnnnnnnnnnnnnnnnnnnnnnnnnnnnnnnnnnnnnnnnnnnnnnnnnnnnnnnnnnnnnnnnnnnnnnnnnnnnnnnnnnnnnnnnnnnnnnnnnnnnnnnnnnnnnnnnnnnnnnnnnnnnnnnnnnnnnnnnnnnnnnnnnnnnnnnnnnnnnnnnnnnnnnnnnnnnnnnnnnnnnnnnnnnnnnnnnnnnnnnnnnnnnnnnnnnnnnnnnnnnnnnnnnnnnnnnnnnnnnnnnnnnnnnnnnnnnnnnnnnnnnnnnnnnnnnnnnnnnnnnnnnnnnnnnnnnnnnnnnnnnnnnnnnnnnnnnnnnnnnnnnnnnnnnnnnnnnnnnnnnnnnnnnnnnnnnnnnnnnnnnnnnnnnnnnnnnnnnnnnnnnnnnnnnnnnnnnnnnnnnnnnnnnnnnnnnnnnnnnnnnnnnnnnnnnnnnnnnnnnnnnnnnnnnnnnnnnnnnnnnnnnnnnnnnnnnnnnnnnnnnnnnnnnnnnnnnnnnnnnnnnnnnnnnnnnnnnnnnnnnnnnnnnnnnnnnnnnnnnnnnnnnnnnnnnnnnnnnnnnnnnnnnnnnnnnnnnnnnnnnnnnnnnnnnnnnnnnnnnnnnnnnnnnnnnnnnnnnnnnnnnnnnnnnnnnnnnnnnnnnnnnnnnnnnnnnnnnnnnnnnnnnnnnnnnnnnnnnnnnnnnnnnnnnnnnnnnnnnnnnnnnnnnnnnnnnnnnnnnnnnnnnnnnnnnnnnnnnnnnnnnnnnnnnnnnnnnnnnnnnnnnnnnnnnnnnnnnnnnnnnnnnnnnnnnnnnnnnnnnnnnnnnnnnnnnnnnnnnnnnnnnnnnnnnnnnnnnnnnnnnnnnnnnnnnnnnnnnnnnnnnnnnnnnnnnnnnnnnnnnnnnnnnnnnnnnnnnnnnnnnnnnnnnnnnnnnnnnnnnnnnnnnnnnnnnnnnnnnnnnnnnnnnnnnnnnnnnnnnnnnnnnnnnnnnnnnnnnnnnnnnnnnnnnnnnnnnnnnnnnnnnnnnnnnnnnnnnnnnnnnnnnnnnnnnnnnnnnnnnnnnnnnnnnnnnnnnnnnnnnnnnnnnnnnnnnnnnnnnnnnnnnnnnnnnnnnnnnnnnnnnnnnnnnnnnnnnnnnnnnnnnnnnnnnnnnnnnnnnnnnnnnnnnnnnnnnnnnnnnnnnnnnnnnnnnnnnnnnnnnnnnnnnnnnnnnnnnnnnnnnnnnnnnnnnnnnnnnnnnnnnnnnnnnnnnnnnnnnnnnnnnnnnnnnnnnnnnnnnnnnnnnnnnnnnnnnnnnnnnnnnnnnnnnnnnnnnnnnnnnnnnnnnnnnnnnnnnnnnnnnnnnnnnnnnnnnnnnnnnnnnnnnnnnnnnnnnnnnnnnnnnnnnnnnnnnnnnnnnnnnnnnnnnnnnnnnnnnnnnnnnnnnnnnnnnnnnnnnnnnnnnnnnnnnnnnnnnnnnnnnnnnnnnnnnnnnnnnnnnnnnnnnnnnnnnnnnnnnnnnnnnnnnnnnnnnnnnnnnnnnnnnnnnnnnnnnnnnnnnnnnnnnnnnnnnnnnnnnnnnnnnnnnnnnnnnnnnnnnnnnnnnnnnnnnnnnnnnnnnnnnnnnnnnnnnnnnnnnnnnnnnnnnnnnnnnnnnnnnnnnnnnnnnnnnnnnnnnnnnnnnnnnnnnnnnnnnnnnnnnnnnnnnnnnnnnnnnnnnnnnnnnnnnnnnnnnnnnnnnnnnnnnnnnnnnnnnnnnnnnnnnnnnnnnnnnnnnnnnnnnnnnnnnnnnnnnnnnnnnnnnnnnnnnnnnnnnnnnnnnnnnnnnnnnnnnnnnnnnnnnnnnnnnnnnnnnnnnnnnnnnnnnnnnnnnnnnnnnnnnnnnnnnnnnnnnnnnnnnnnnnnnnnnnnnnnnnnnnnnnnnnnnnnnnnnnnnnnnnnnnnnnnnnnnnnnnnnnnnnnnnnnnnnnnnnnnnnnnnnnnnnnnnnnnnnnnnnnnnnnnnnnnnnnnnnnnnnnnnnnnnnnnnnnnnnnnnnnnnnnnnnnnnnnnnnnnnnnnnnnnnnnnnnnnnnnnnnnnnnnnnnnnnnnnnnnnnnnnnnnnnnnnnnnnnnnnnnnnnnnnnnnnnnnnnnnnnnnnnnnnnnnnnnnnnnnnnnnnnnnnnnnnnnnnnnnnnnnnnnnnnnnnnnnnnnnnnnnnnnnnnnnnnnnnnnnnnnnnnnnnnnnnnnnnnnnnnnnnnnnnnnnnnnnnnnnnnnnnnnnnnnnnnnnnnnnnnnnnnnnnnnnnnnnnnnnnnnnnnnnnnnnnnnnnnnnnnnnnnnnnnnnnnnnnnnnnnnnnnnnnnnnnnnnnnnnnnnnnnnnnnnnnnnnnnnnnnnnnnnnnnnnnnnnnnnnnnnnnnnnnnnnnnnnnnnnnnnnnnnnnnnnnnnnnnnnnnnnnnnnnnnnnnnnnnnnnnnnnnnnnnnnnnnnnnnnnnnnnnnnnnnnnnnnnnnnnnnnnnnnnnnnnnnnnnnnnnnnnnnnnnnnnnnnnnnnnnnnnnnnnnnnnnnnnnnnnnnnnnnnnnnnnnnnnnnnnnnnnnnnnnnnnnnnnnnnnnnnnnnnnnnnnnnnnnnnnnnnnnnnnnnnnnnnnnnnnnnnnnnnnnnnnnnnnnnnnnnnnnnnnnnnnnnnnnnnnnnnnnnnnnnnnnnnnnnnnnnnnnnnnnnnnnnnnnnnnnnnnnnnnnnnnnnnnnnnnnnnnnnnnnnnnnnnnnnnnnnnnnnnnnnnnnnnnnnnnnnnnnnnnnnnnnnnnnnnnnnnnnnnnnnnnnnnnnnnnnnnnnnnnnnnnnnnnnnnnnnnnnnnnnnnnnnnnnnnnnnnnnnnnnnnnnnnnnnnnnnnnnnnnnnnnnnnnnnnnnnnnnnnnnnnnnnnnnnnnnnnnnnnnnnnnnnnnnnnnnnnnnnnnnnnnnnnnnnnnnnnnnnnnnnnnnnnnnnnnnnnnnnnnnnnnnnnnnnnnnnnnnnnnnnnnnnnnnnnnnnnnnnnnnnnnnnnnnnnnnnnnnnnnnnnnnnnnnnnnnnnnnnnnnnnnnnnnnnnnnnnnnnnnnnnnnnnnnnnnnnnnnnnnnnnnnnnnnnnnnnnnnnnnnnnnnnnnnnnnnnnnnnnnnnnnnnnnnnnnnnnnnnnnnnnnnnnnnnnnnnnnnnnnnnnnnnnnnnnnnnnnnnnnnnnnnnnnnnnnnnnnnnnnnnnnnnnnnnnnnnnnnnnnnnnnnnnnnnnnnnnnnnnnnnnnnnnnnnnnnnnnnnnnnnnnnnnnnnnnnnnnnnnnnnnnnnnnnnnnnnnnnnnnnnnnnnnnnnnnnnnnnnnnnnnnnnnnnnnnnnnnnnnnnnnnnnnnnnnnnnnnnnnnnnnnnnnnnnnnnnnnnnnnnnnnnnnnnnnnnnnnnnnnnnnnnnnnnnnnnnnnnnnnnnnnnnnnnnnnnnnnnnnnnnnnnnnnnnnnnnnnnnnnnnnnnnnnnnnnnnnnnnnnnnnnnnnnnnnnnnnnnnnnnnnnnnnnnnnnnnnnnnnnnnnnnnnnnnnnnnnnnnnnnnnnnnnnnnnnnnnnnnnnnnnnnnnnnnnnnnnnnnnnnnnnnnnnnnnnnnnnnnnnnnnnnnnnnnnnnnnnnnnnnnnnnnnnnnnnnnnnnnnnnnnnnnnnnnnnnnnnnnnnnnnnnnnnnnnnnnnnnnnnnnnnnnnnnnnnnnnnnnnnnnnnnnnnnnnnnnnnnnnnnnnnnnnnnnnnnnnnnnnnnnnnnnnnnnnnnnnnnnnnnnnnnnnnnnnnnnnnnnnnnnnnnnnnnnnnnnnnnnnnnnnnnnnnnnnnnnnnnnnnnnnnnnnnnnnnnnnnnnnnnnnnnnnnnnnnnnnnnnnnnnnnnnnnnnnnnnnnnnnnnnnnnnnnnnnnnnnnnnnnnnnnnnnnnnnnnnnnnnnnnnnnnnnnnnnnnnnnnnnnnnnnnnnnnnnnnnnnnnnnnnnnnnnnnnnnnnnnnnnnnnnnnnnnnnnnnnnnnnnnnnnnnnnnnnnnnnnnnnnnnnnnnnnnnnnnnnnnnnnnnnnnnnnnnnnnnnnnnnnnnnnnnnnnnnnnnnnnnnnnnnnnnnnnnnnnnnnnnnnnnnnnnnnnnnnnnnnnnnnnnnnnnnnnnnnnnnnnnnnnnnnnnnnnnnnnnnnnnnnnnnnnnnnnnnnnnnnnnnnnnnnnnnnnnnnnnnnnnnnnnnnnnnnnnnnnnnnnnnnnnnnnnnnnnnnnnnnnnnnnnnnnnnnnnnnnnnnnnnnnnnnnnnnnnnnnnnnnnnnnnnnnnnnnnnnnnnnnnnnnnnnnnnnnnnnnnnnnnnnnnnnnnnnnnnnnnnnnnnnnnnnnnnnnnnnnnnnnnnnnnnnnnnnnnnnnnnnnnnnnnnnnnnnnnnnnnnnnnnnnnnnnnnnnnnnnnnnnnnnnnnnnnnnnnnnnnnnnnnnnnnnnnnnnnnnnnnnnnnnnnnnnnnnnnnnnnnnnnnnnnnnnnnnnnnnnnnnnnnnnnnnnnnnnnnnnnnnnnnnnnnnnnnnnnnnnnnnnnnnnnnnnnnnnnnnnnnnnnnnnnnnnnnnnnnnnnnnnnnnnnnnnnnnnnnnnnnnnnnnnnnnnnnnnnnnnnnnnnnnnnnnnnnnnnnnnnnnnnnnnnnnnnnnnnnnnnnnnnnnnnnnnnnnnnnnnnnnnnnnnnnnnnnnnnnnnnnnnnnnnnnnnnnnnnnnnnnnnnnnnnnnnnnnnnnnnnnnnnnnnnnnnnnnnnnnnnnnnnnnnnnnnnnnnnnnnnnnnnnnnnnnnnnnnnnnnnnnnnnnnnnnnnnnnnnnnnnnnnnnnnnnnnnnnnnnnnnnnnnnnnnnnnnnnnnnnnnnnnnnnnnnnnnnnnnnnnnnnnnnnnnnnnnnnnnnnnnnnnnnnnnnnnnnnnnnnnnnnnnnnnnnnnnnnnnnnnnnnnnnnnnnnnnnnnnnnnnnnnnnnnnnnnnnnnnnnnnnnnnnnnnnnnnnnnnnnnnnnnnnnnnnnnnnnnnnnnnnnnnnnnnnnnnnnnnnnnnnnnnnnnnnnnnnnnnnnnnnnnnnnnnnnnnnnnnnnnnnnnnnnnnnnnnnnnnnnnnnnnnnnnnnnnnnnnnnnnnnnnnnnnnnnnnnnnnnnnnnnnnnnnnnnnnnnnnnnnnnnnnnnnnnnnnnnnnnnnnnnnnnnnnnnnnnnnnnnnnnnnnnnnnnnnnnnnnnnnnnnnnnnnnnnnnnnnnnnnnnnnnnnnnnnnnnnnnnnnnnnnnnnnnnnnnnnnnnnnnnnnnnnnnnnnnnnnnnnnnnnnnnnnnnnnnnnnnnnnnnnnnnnnnnnnnnnnnnnnnnnnnnnnnnnnnnnnnnnnnnnnnnnnnnnnnnnnnnnnnnnnnnnnnnnnnnnnnnnnnnnnnnnnnnnnnnnnnnnnnnnnnnnnnnnnnnnnnnnnnnnnnnnnnnnnnnnnnnnnnnnnnnnnnnnnnnnnnnnnnnnnnnnnnnnnnnnnnnnnnnnnnnnnnnnnnnnnnnnnnnnnnnnnnnnnnnnnnnnnnnnnnnnnnnnnnnnnnnnnnnnnnnnnnnnnnnnnnnnnnnnnnnnnnnnnnnnnnnnnnnnnnnnnnnnnnnnnnnnnnnnnnnnnnnnnnnnnnnnnnnnnnnnnnnnnnnnnnnnnnnnnnnnnnnnnnnnnnnnnnnnnnnnnnnnnnnnnnnnnnnnnnnnnnnnnnnnnnnnnnnnnnnnnnnnnnnnnnnnnnnnnnnnnnnnnnnnnnnnnnnnnnnnnnnnnnnnnnnnnnnnnnnnnnnnnnnnnnnnnnnnnnnnnnnnnnnnnnnnnnnnnnnnnnnnnnnnnnnnnnnnnnnnnnnnnnnnnnnnnnnnnnnnnnnnnnnnnnnnnnnnnnnnnnnnnnnnnnnnnnnnnnnnnnnnnnnnnnnnnnnnnnnnnnnnnnnnnnnnnnnnnnnnnnnnnnnnnnnnnnnnnnnnnnnnnnnnnnnnnnnnnnnnnnnnnnnnnnnnnnnnnnnnnnnnnnnnnnnnnnnnnnnnnnnnnnnnnnnnnnnnnnnnnnnnnnnnnnnnnnnnnnnnnnnnnnnnnnnnnnnnnnnnnnnnnnnnnnnnnnnnnnnnnnnnnnnnnnnnnnnnnnnnnnnnnnnnnnnnnnnnnnnnnnnnnnnnnnnnnnnnnnnnnnnnnnnnnnnnnnnnnnnnnnnnnnnnnnnnnnnnnnnnnnnnnnnnnnnnnnnnnnnnnnnnnnnnnnnnnnnnnnnnnnnnnnnnnnnnnnnnnnnnnnnnnnnnnnnnnnnnnnnnnnnnnnnnnnnnnnnnnnnnnnnnnnnnnnnnnnnnnnnnnnnnnnnnnnnnnnnnnnnnnnnnnnnnnnnnnnnnnnnnnnnnnnnnnnnnnnnnnnnnnnnnnnnnnnnnnnnnnnnnnnnnnnnnnnnnnnnnnnnnnnnnnnnnnnnnnnnnnnnnnnnnnnnnnnnnnnnnnnnnnnnnnnnnnnnnnnnnnnnnnnnnnnnnnnnnnnnnnnnnnnnnnnnnnnnnnnnnnnnnnnnnnnnnnnnnnnnnnnnnnnnnnnnnnnnnnnnnnnnnnnnnnnnnnnnnnnnnnnnnnnnnnnnnnnnnnnnnnnnnnnnnnnnnnnnnnnnnnnnnnnnnnnnnnnnnnnnnnnnnnnnnnnnnnnnnnnnnnnnnnnnnnnnnnnnnnnnnnnnnnnnnnnnnnnnnnnnnnnnnnnnnnnnnnnnnnnnnnnnnnnnnnnnnnnnnnnnnnnnnnnnnnnnnnnnnnnnnnnnnnnnnnnnnnnnnnnnnnnnnnnnnnnnnnnnnnnnnnnnnnnnnnnnnnnnnnnnnnnnnnnnnnnnnnnnnnnnnnnnnnnnnnnnnnnnnnnnnnnnnnnnnnnnnnnnnnnnnnnnnnnnnnnnnnnnnnnnnnnnnnnnnnnnnnnnnnnnnnnnnnnnnnnnnnnnnnnnnnnnnnnnnnnnnnnnnnnnnnnnnnnnnnnnnnnnnnnnnnnnnnnnnnnnnnnnnnnnnnnnnnnnnnnnnnnnnnnnnnnnnnnnnnnnnnnnnnnnnnnnnnnnnnnnnnnnnnnnnnnnnnnnnnnnnnnnnnnnnnnnnnnnnnnnnnnnnnnnnnnnnnnnnnnnnnnnnnnnnnnnnnnnnnnnnnnnnnnnnnnnnnnnnnnnnnnnnnnnnnnnnnnnnnnnnnnnnnnnnnnnnnnnnnnnnnnnnnnnnnnnnnnnnnnnnnnnnnnnnnnnnnnnnnnnnnnnnnnnnnnnnnnnnnnnnnnnnnnnnnnnnnnnnnnnnnnnnnnnnnnnnnnnnnnnnnnnnnnnnnnnnnnnnnnnnnnnnnnnnnnnnnnnnnnnnnnnnnnnnnnnnnnnnnnnnnnnnnnnnnnnnnnnnnnnnnnnnnnnnnnnnnnnnnnnnnnnnnnnnnnnnnnnnnnnnnnnnnnnnnnnnnnnnnnnnnnnnnnnnnnnnnnnnnnnnnnnnnnnnnnnnnnnnnnnnnnnnnnnnnnnnnnnnnnnnnnnnnnnnnnnnnnnnnnnnnnnnnnnnnnnnnnnnnnnnnnnnnnnnnnnnnnnnnnnnnnnnnnnnnnnnnnnnnnnnnnnnnnnnnnnnnnnnnnnnnnnnnnnnnnnnnnnnnnnnnnnnnnnnnnnnnnnnnnnnnnnnnnnnnnnnnnnnnnnnnnnnnnnnnnnnnnnnnnnnnnnnnnnnnnnnnnnnnnnnnnnnnnnnnnnnnnnnnnnnnnnnnnnnnnnnnnnnnnnnnnnnnnnnnnnnnnnnnnnnnnnnnnnnnnnnnnnnnnnnnnnnnnnnnnnnnnnnnnnnnnnnnnnnnnnnnnnnnnnnnnnnnnnnnnnnnnnnnnnnnnnnnnnnnnnnnnnnnnnnnnnnnnnnnnnnnnnnnnnnnnnnnnnnnnnnnnnnnnnnnnnnnnnnnnnnnnnnnnnnnnnnnnnnnnnnnnnnnnnnnnnnnnnnnnnnnnnnnnnnnnnnnnnnnnnnnnnnnnnnnnnnnnnnnnnnnnnnnnnnnnnnnnnnnnnnnnnnnnnnnnnnnnnnnnnnnnnnnnnnnnnnnnnnnnnnnnnnnnnnnnnnnnnnnnnnnnnnnnnnnnnnnnnnnnnnnnnnnnnnnnnnnnnnnnnnnnnnnnnnnnnnnnnnnnnnnnnnnnnnnnnnnnnnnnnnnnnnnnnnnnnnnnnnnnnnnnnnnnnnnnnnnnnnnnnnnnnnnnnnnnnnnnnnnnnnnnnnnnnnnnnnnnnnnnnnnnnnnnnnnnnnnnnnnnnnnnnnnnnnnnnnnnnnnnnnnnnnnnnnnnnnnnnnnnnnnnnnnnnnnnnnnnnnnnnnnnnnnnnnnnnnnnnnnnnnnnnnnnnnnnnnnnnnnnnnnnnnnnnnnnnnnnnnnnnnnnnnnnnnnnnnnnnnnnnnnnnnnnnnnnnnnnnnnnnnnnnnnnnnnnnnnnnnnnnnnnnnnnnnnnnnnnnnnnnnnnnnnnnnnnnnnnnnnnnnnnnnnnnnnnnnnnnnnnnnnnnnnnnnnnnnnnnnnnnnnnnnnnnnnnnnnnnnnnnnnnnnnnnnnnnnnnnnnnnnnnnnnnnnnnnnnnnnnnnnnnnnnnnnnnnnnnnnnnnnnnnnnnnnnnnnnnnnnnnnnnnnnnnnnnnnnnnnnnnnnnnnnnnnnnnnnnnnnnnnnnnnnnnnnnnnnnnnnnnnnnnnnnnnnnnnnnnnnnnnnnnnnnnnnnnnnnnnnnnnnnnnnnnnnnnnnnnnnnnnnnnnnnnnnnnnnnnnnnnnnnnnnnnnnnnnnnnnnnnnnnnnnnnnnnnnnnnnnnnnnnnnnnnnnnnnnnnnnnnnnnnnnnnnnnnnnnnnnnnnnnnnnnnnnnnnnnnnnnnnnnnnnnnnnnnnnnnnnnnnnnnnnnnnnnnnnnnnnnnnnnnnnnnnnnnnnnnnnnnnnnnnnnnnnnnnnnnnnnnnnnnnnnnnnnnnnnnnnnnnnnnnnnnnnnnnnnnnnnnnnnnnnnnnnnnnnnnnnnnnnnnnnnnnnnnnnnnnnnnnnnnnnnnnnnnnnnnnnnnnnnnnnnnnnnnnnnnnnnnnnnnnnnnnnnnnnnnnnnnnnnnnnnnnnnnnnnnnnnnnnnnnnnnnnnnnnnnnnnnnnnnnnnnnnnnnnnnnnnnnnnnnnnnnnnnnnnnnnnnnnnnnnnnnnnnnnnnnnnnnnnnnnnnnnnnnnnnnnnnnnnnnnnnnnnnnnnnnnnnnnnnnnnnnnnnnnnnnnnnnnnnnnnnnnnnnnnnnnnnnnnnnnnnnnnnnnnnnnnnnnnnnnnnnnnnnnnnnnnnnnnnnnnnnnnnnnnnnnnnnnnnnnnnnnnnnnnnnnnnnnnnnnnnnnnnnnnnnnnnnnnnnnnnnnnnnnnnnnnnnnnnnnnnnnnnnnnnnnnnnnnnnnnnnnnnnnnnnnnnnnnnnnnnnnnnnnnnnnnnnnnnnnnnnnnnnnnnnnnnnnnnnnnnnnnnnnnnnnnnnnnnnnnnnnnnnnnnnnnnnnnnnnnnnnnnnnnnnnnnnnnnnnnnnnnnnnnnnnnnnnnnnnnnnnnnnnnnnnnnnnnnnnnnnnnnnnnnnnnnnnnnnnnnnnnnnnnnnnnnnnnnnnnnnnnnnnnnnnnnnnnnnnnnnnnnnnnnnnnnnnnnnnnnnnnnnnnnnnnnnnnnnnnnnnnnnnnnnnnnnnnnnnnnnnnnnnnnnnnnnnnnnnnnnnnnnnnnnnnnnnnnnnnnnnnnnnnnnnnnnnnnnnnnnnnnnnnnnnnnnnnnnnnnnnnnnnnnnnnnnnnnnnnnnnnnnnnnnnnnnnnnnnnnnnnnnnnnnnnnnnnnnnnnnnnnnnnnnnnnnnnnnnnnnnnnnnnnnnnnnnnnnnnnnnnnnnnnnnnnnnnnnnnnnnnnnnnnnnnnnnnnnnnnnnnnnnnnnnnnnnnnnnnnnnnnnnnnnnnnnnnnnnnnnnnnnnnnnnnnnnnnnnnnnnnnnnnnnnnnnnnnnnnnnnnnnnnnnnnnnnnnnnnnnnnnnnnnnnnnnnnnnnnnnnnnnnnnnnnnnnnnnnnnnnnnnnnnnnnnnnnnnnnnnnnnnnnnnnnnnnnnnnnnnnnnnnnnnnnnnnnnnnnnnnnnnnnnnnnnnnnnnnnnnnnnnnnnnnnnnnnnnnnnnnnnnnnnnnnnnnnnnnnnnnnnnnnnnnnnnnnnnnnnnnnnnnnnnnnnnnnnnnnnnnnnnnnnnnnnnnnnnnnnnnnnnnnnnnnnnnnnnnnnnnnnnnnnnnnnnnnnnnnnnnnnnnnnnnnnnnnnnnnnnnnnnnnnnnnnnnnnnnnnnnnnnnnnnnnnnnnnnnnnnnnnnnnnnnnnnnnnnnnnnnnnnnnnnnnnnnnnnnnnnnnnnnnnnnnnnnnnnnnnnnnnnnnnnnnnnnnnnnnnnnnnnnnnnnnnnnnnnnnnnnnnnnnnnnnnnnnnnnnnnnnnnnnnnnnnnnnnnnnnnnnnnnnnnnnnnnnnnnnnnnnnnnnnnnnnnnnnnnnnnnnnnnnnnnnnnnnnnnnnnnnnnnnnnnnnnnnnnnnnnnnnnnnnnnnnnnnnnnnnnnnnnnnnnnnnnnnnnnnnnnnnnnnnnnnnnnnnnnnnnnnnnnnnnnnnnnnnnnnnnnnnnnnnnnnnnnnnnnnnnnnnnnnnnnnnnnnnnnnnnnnnnnnnnnnnnnnnnnnnnnnnnnnnnnnnnnnnnnnnnnnnnnnnnnnnnnnnnnnnnnnnnnnnnnnnnnnnnnnnnnnnnnnnnnnnnnnnnnnnnnnnnnnnnnnnnnnnnnnnnnnnnnnnnnnnnnnnnnnnnnnnnnnnnnnnnnnnnnnnnnnnnnnnnnnnnnnnnnnnnnnnnnnnnnnnnnnnnnnnnnnnnnnnnnnnnnnnnnnnnnnnnnnnnnnnnnnnnnnnnnnnnnnnnnnnnnnnnnnnnnnnnnnnnnnnnnnnnnnnnnnnnnnnnnnnnnnnnnnnnnnnnnnnnnnnnnnnnnnnnnnnnnnnnnnnnnnnnnnnnnnnnnnnnnnnnnnnnnnnnnnnnnnnnnnnnnnnnnnnnnnnnnnnnnnnnnnnnnnnnnnnnnnnnnnnnnnnnnnnnnnnnnnnnnnnnnnnnnnnnnnnnnnnnnnnnnnnnnnnnnnnnnnnnnnnnnnnnnnnnnnnnnnnnnnnnnnnnnnnnnnnnnnnnnnnnnnnnnnnnnnnnnnnnnnnnnnnnnnnnnnnnnnnnnnnnnnnnnnnnnnnnnnnnnnnnnnnnnnnnnnnnnnnnnnnnnnnnnnnnnnnnnnnnnnnnnnnnnnnnnnnnnnnnnnnnnnnnnnnnnnnnnnnnnnnnnnnnnnnnnnnnnnnnnnnnnnnnnnnnnnnnnnnnnnnnnnnnnnnnnnnnnnnnnnnnnnnnnnnnnnnnnnnnnnnnnnnnnnnnnnnnnnnnnnnnnnnnnnnnnnnnnnnnnnnnnnnnnnnnnnnnnnnnnnnnnnnnnnnnnnnnnnnnnnnnnnnnnnnnnnnnnnnnnnnnnnnnnnnnnnnnnnnnnnnnnnnnnnnnnnnnnnnnnnnnnnnnnnnnnnnnnnnnnnnnnnnnnnnnnnnnnnnnnnnnnnnnnnnnnnnnnnnnnnnnnnnnnnnnnnnnnnnnnnnnnnnnnnnnnnnnnnnnnnnnnnnnnnnnnnnnnnnnnnnnnnnnnnnnnnnnnnnnnnnnnnnnnnnnnnnnnnnnnnnnnnnnnnnnnnnnnnnnnnnnnnnnnnnnnnnnnnnnnnnnnnnnnnnnnnnnnnnnnnnnnnnnnnnnnnnnnnnnnnnnnnnnnnnnnnnnnnnnnnnnnnnnnnnnnnnnnnnnnnnnnnnnnnnnnnnnnnnnnnnnnnnnnnnnnnnnnnnnnnnnnnnnnnnnnnnnnnnnnnnnnnnnnnnnnnnnnnnnnnnnnnnnnnnnnnnnnnnnnnnnnnnnnnnnnnnnnnnnnnnnnnnnnnnnnnnnnnnnnnnnnnnnnnnnnnnnnnnnnnnnnnnnnnnnnnnnnnnnnnnnnnnnnnnnnnnnnnnnnnnnnnnnnnnnnnnnnnnnnnnnnnnnnnnnnnnnnnnnnnnnnnnnnnnnnnnnnnnnnnnnnnnnnnnnnnnnnnnnnnnnnnnnnnnnnnnnnnnnnnnnnnnnnnnnnnnnnnnnnnnnnnnnnnnnnnnnnnnnnnnnnnnnnnnnnnnnnnnnnnnnnnnnnnnnnnnnnnnnnnnnnnnnnnnnnnnnnnnnnnnnnnnnnnnnnnnnnnnnnnnnnnnnnnnnnnnnnnnnnnnnnnnnnnnnnnnnnnnnnnnnnnnnnnnnnnnnnnnnnnnnnnnnnnnnnnnnnnnnnnnnnnnnnnnnnnnnnnnnnnnnnnnnnnnnnnnnnnnnnnnnnnnnnnnnnnnnnnnnnnnnnnnnnnnnnnnnnnnnnnnnnnnnnnnnnnnnnnnnnnnnnnnnnnnnnnnnnnnnnnnnnnnnnnnnnnnnnnnnnnnnnnnnnnnnnnnnnnnnnnnnnnnnnnnnnnnnnnnnnnnnnnnnnnnnnnnnnnnnnnnnnnnnnnnnnnnnnnnnnnnnnnnnnnnnnnnnnnnnnnnnnnnnnnnnnnnnnnnnnnnnnnnnnnnnnnnnnnnnnnnnnnnnnnnnnnnnnnnnnnnnnnnnnnnnnnnnnnnnnnnnnnnnnnnnnnnnnnnnnnnnnnnnnnnnnnnnnnnnnnnnnnnnnnnnnnnnnnnnnnnnnnnnnnnnnnnnnnnnnnnnnnnnnnnnnnnnnnnnnnnnnnnnnnnnnnnnnnnnnnnnnnnnnnnnnnnnnnnnnnnnnnnnnnnnnnnnnnnnnnnnnnnnnnnnnnnnnnnnnnnnnnnnnnnnnnnnnnnnnnnnnnnnnnnnnnnnnnnnnnnnnnnnnnnnnnnnnnnnnnnnnnnnnnnnnnnnnnnnnnnnnnnnnnnnnnnnnnnnnnnnnnnnnnnnnnnnnnnnnnnnnnnnnnnnnnnnnnnnnnnnnnnnnnnnnnnnnnnnnnnnnnnnnnnnnnnnnnnnnnnnnnnnnnnnnnnnnnnnnnnnnnnnnnnnnnnnnnnnnnnnnnnnnnnnnnnnnnnnnnnnnnnnnnnnnnnnnnnnnnnnnnnnnnnnnnnnnnnnnnnnnnnnnnnnnnnnnnnnnnnnnnnnnnnnnnnnnnnnnnnnnnnnnnnnnnnnnnnnnnnnnnnnnnnnnnnnnnnnnnnnnnnnnnnnnnnnnnnnnnnnnnnnnnnnnnnnnnnnnnnnnnnnnnnnnnnnnnnnnnnnnnnnnnnnnnnnnnnnnnnnnnnnnnnnnnnnnnnnnnnnnnnnnnnnnnnnnnnnnnnnnnnnnnnnnnnnnnnnnnnnnnnnnnnnnnnnnnnnnnnnnnnnnnnnnnnnnnnnnnnnnnnnnnnnnnnnnnnnnnnnnnnnnnnnnnnnnnnnnnnnnnnnnnnnnnnnnnnnnnnnnnnnnnnnnnnnnnnnnnnnnnnnnnnnnnnnnnnnnnnnnnnnnnnnnnnnnnnnnnnnnnnnnnnnnnnnnnnnnnnnnnnnnnnnnnnnnnnnnnnnnnnnnnnnnnnnnnnnnnnnnnnnnnnnnnnnnnnnnnnnnnnnnnnnnnnnnnnnnnnnnnnnnnnnnnnnnnnnnnnnnnnnnnnnnnnnnnnnnnnnnnnnnnnnnnnnnnnnnnnnnnnnnnnnnnnnnnnnnnnnnnnnnnnnnnnnnnnnnnnnnnnnnnnnnnnnnnnnnnnnnnnnnnnnnnnnnnnnnnnnnnnnnnnnnnnnnnnnnnnnnnnnnnnnnnnnnnnnnnnnnnnnnnnnnnnnnnnnnnnnnnnnnnnnnnnnnnnnnnnnnnnnnnnnnnnnnnnnnnnnnnnnnnnnnnnnnnnnnnnnnnnnnnnnnnnnnnnnnnnnnnnnnnnnnnnnnnnnnnnnnnnnnnnnnnnnnnnnnnnnnnnnnnnnnnnnnnnnnnnnnnnnnnnnnnnnnnnnnnnnnnnnnnnnnnnnnnnnnnnnnnnnnnnnnnnnnnnnnnnnnnnnnnnnnnnnnnnnnnnnnnnnnnnnnnnnnnnnnnnnnnnnnnnnnnnnnnnnnnnnnnnnnnnnnnnnnnnnnnnnnnnnnnnnnnnnnnnnnnnnnnnnnnnnnnnnnnnnnnnnnnnnnnnnnnnnnnnnnnnnnnnnnnnnnnnnnnnnnnnnnnnnnnnnnnnnnnnnnnnnnnnnnnnnnnnnnnnnnnnnnnnnnnnnnnnnnnnnnnnnnnnnnnnnnnnnnnnnnnnnnnnnnnnnnnnnnnnnnnnnnnnnnnnnnnnnnnnnnnnnnnnnnnnnnnnnnnnnnnnnnnnnnnnnnnnnnnnnnnnnnnnnnnnnnnnnnnnnnnnnnnnnnnnnnnnnnnnnnnnnnnnnnnnnnnnnnnnnnnnnnnnnnnnnnnnnnnnnnnnnnnnnnnnnnnnnnnnnnnnnnnnnnnnnnnnnnnnnnnnnnnnnnnnnnnnnnnnnnnnnnnnnnnnnnnnnnnnnnnnnnnnnnnnnnnnnnnnnnnnnnnnnnnnnnnnnnnnnnnnnnnnnnnnnnnnnnnnnnnnnnnnnnnnnnnnnnnnnnnnnnnnnnnnnnnnnnnnnnnnnnnnnnnnnnnnnnnnnnnnnnnnnnnnnnnnnnnnnnnnnnnnnnnnnnnnnnnnnnnnnnnnnnnnnnnnnnnnnnnnnnnnnnnnnnnnnnnnnnnnnnnnnnnnnnnnnnnnnnnnnnnnnnnnnnnnnnnnnnnnnnnnnnnnnnnnnnnnnnnnnnnnnnnnnnnnnnnnnnnnnnnnnnnnnnnnnnnnnnnnnnnnnnnnnnnnnnnnnnnnnnnnnnnnnnnnnnnnnnnnnnnnnnnnnnnnnnnnnnnnnnnnnnnnnnnnnnnnnnnnnnnnnnnnnnnnnnnnnnnnnnnnnnnnnnnnnnnnnnnnnnnnnnnnnnnnnnnnnnnnnnnnnnnnnnnnnnnnnnnnnnnnnnnnnnnnnnnnnnnnnnnnnnnnnnnnnnnnnnnnnnnnnnnnnnnnnnnnnnnnnnnnnnnnnnnnnnnnnnnnnnnnnnnnnnnnnnnnnnnnnnnnnnnnnnnnnnnnnnnnnnnnnnnnnnnnnnnnnnnnnnnnnnnnnnnnnnnnnnnnnnnnnnnnnnnnnnnnnnnnnnnnnnnnnnnnnnnnnnnnnnnnnnnnnnnnnnnnnnnnnnnnnnnnnnnnnnnnnnnnnnnnnnnnnnnnnnnnnnnnnnnnnnnnnnnnnnnnnnnnnnnnnnnnnnnnnnnnnnnnnnnnnnnnnnnnnnnnnnnnnnnnnnnnnnnnnnnnnnnnnnnnnnnnnnnnnnnnnnnnnnnnnnnnnnnnnnnnnnnnnnnnnnnnnnnnnnnnnnnnnnnnnnnnnnnnnnnnnnnnnnnnnnnnnnnnnnnnnnnnnnnnnnnnnnnnnnnnnnnnnnnnnnnnnnnnnnnnnnnnnnnnnnnnnnnnnnnnnnnnnnnnnnnnnnnnnnnnnnnnnnnnnnnnnnnnnnnnnnnnnnnnnnnnnnnnnnnnnnnnnnnnnnnnnnnnnnnnnnnnnnnnnnnnnnnnnnnnnnnnnnnnnnnnnnnnnnnnnnnnnnnnnnnnnnnnnnnnnnnnnnnnnnnnnnnnnnnnnnnnnnnnnnnnnnnnnnnnnnnnnnnnnnnnnnnnnnnnnnnnnnnnnnnnnnnnnnnnnnnnnnnnnnnnnnnnnnnnnnnnnnnnnnnnnnnnnnnnnnnnnnnnnnnnnnnnnnnnnnnnnnnnnnnnnnnnnnnnnnnnnnnnnnnnnnnnnnnnnnnnnnnnnnnnnnnnnnnnnnnnnnnnnnnnnnnnnnnnnnnnnnnnnnnnnnnnnnnnnnnnnnnnnnnnnnnnnnnnnnnnnnnnnnnnnnnnnnnnnnnnnnnnnnnnnnnnnnnnnnnnnnnnnnnnnnnnnnnnnnnnnnnnnnnnnnnnnnnnnnnnnnnnnnnnnnnnnnnnnnnnnnnnnnnnnnnnnnnnnnnnnnnnnnnnnnnnnnnnnnnnnnnnnnnnnnnnnnnnnnnnnnnnnnnnnnnnnnnnnnnnnnnnnnnnnnnnnnnnnnnnnnnnnnnnnnnnnnnnnnnnnnnnnnnnnnnnnnnnnnnnnnnnnnnnnnnnnnnnnnnnnnnnnnnnnnnnnnnnnnnnnnnnnnnnnnnnnnnnnnnnnnnnnnnnnnnnnnnnnnnnnnnnnnnnnnnnnnnnnnnnnnnnnnnnnnnnnnnnnnnnnnnnnnnnnnnnnnnnnnnnnnnnnnnnnnnnnnnnnnnnnnnnnnnnnnnnnnnnnnnnnnnnnnnnnnnnnnnnnnnnnnnnnnnnnnnnnnnnnnnnnnnnnnnnnnnnnnnnnnnnnnnnnnnnnnnnnnnnnnnnnnnnnnnnnnnnnnnnnnnnnnnnnnnnnnnnnnnnnnnnnnnnnnnnnnnnnnnnnnnnnnnnnnnnnnnnnnnnnnnnnnnnnnnnnnnnnnnnnnnnnnnnnnnnnnnnnnnnnnnnnnnnnnnnnnnnnnnnnnnnnnnnnnnnnnnnnnnnnnnnnnnnnnnnnnnnnnnnnnnnnnnnnnnnnnnnnnnnnnnnnnnnnnnnnnnnnnnnnnnnnnnnnnnnnnnnnnnnnnnnnnnnnnnnnnnnnnnnnnnnnnnnnnnnnnnnnnnnnnnnnnnnnnnnnnnnnnnnnnnnnnnnnnnnnnnnnnnnnnnnnnnnnnnnnnnnnnnnnnnnnnnnnnnnnnnnnnnnnnnnnnnnnnnnnnnnnnnnnnnnnnnnnnnnnnnnnnnnnnnnnnnnnnnnnnnnnnnnnnnnnnnnnnnnnnnnnnnnnnnnnnnnnnnnnnnnnnnnnnnnnnnnnnnnnnnnnnnnnnnnnnnnnnnnnnnnnnnnnnnnnnnnnnnnnnnnnnnnnnnnnnnnnnnnnnnnnnnnnnnnnnnnnnnnnnnnnnnnnnnnnnnnnnnnnnnnnnnnnnnnnnnnnnnnnnnnnnnnnnnnnnnnnnnnnnnnnnnnnnnnnnnnnnnnnnnnnnnnnnnnnnnnnnnnnnnnnnnnnnnnnnnnnnnnnnnnnnnnnnnnnnnnnnnnnnnnnnnnnnnnnnnnnnnnnnnnnnnnnnnnnnnnnnnnnnnnnnnnnnnnnnnnnnnnnnnnnnnnnnnnnnnnnnnnnnnnnnnnnnnnnnnnnnnnnnnnnnnnnnnnnnnnnnnnnnnnnnnnnnnnnnnnnnnnnnnnnnnnnnnnnnnnnnnnnnnnnnnnnnnnnnnnnnnnnnnnnnnnnnnnnnnnnnnnnnnnnnnnnnnnnnnnnnnnnnnnnnnnnnnnnnnnnnnnnnnnnnnnnnnnnnnnnnnnnnnnnnnnnnnnnnnnnnnnnnnnnnnnnnnnnnnnnnnnnnnnnnnnnnnnnnnnnnnnnnnnnnnnnnnnnnnnnnnnnnnnnnnnnnnnnnnnnnnnnnnnnnnnnnnnnnnnnnnnnnnnnnnnnnnnnnnnnnnnnnnnnnnnnnnnnnnnnnnnnnnnnnnnnnnnnnnnnnnnnnnnnnnnnnnnnnnnnnnnnnnnnnnnnnnnnnnnnnnnnnnnnnnnnnnnnnnnnnnnnnnnnnnnnnnnnnnnnnnnnnnnnnnnnnnnnnnnnnnnnnnnnnnnnnnnnnnnnnnnnnnnnnnnnnnnnnnnnnnnnnnnnnnnnnnnnnnnnnnnnnnnnnnnnnnnnnnnnnnnnnnnnnnnnnnnnnnnnnnnnnnnnnnnnnnnnnnnnnnnnnnnnnnnnnnnnnnnnnnnnnnnnnnnnnnnnnnnnnnnnnnnnnnnnnnnnnnnnnnnnnnnnnnnnnnnnnnnnnnnnnnnnnnnnnnnnnnnnnnnnnnnnnnnnnnnnnnnnnnnnnnnnnnnnnnnnnnnnnnnnnnnnnnnnnnnnnnnnnnnnnnnnnnnnnnnnnnnnnnnnnnnnnnnnnnnnnnnnnnnnnnnnnnnnnnnnnnnnnnnnnnnnnnnnnnnnnnnnnnnnnnnnnnnnnnnnnnnnnnnnnnnnnnnnnnnnnnnnnnnnnnnnnnnnnnnnnnnnnnnnnnnnnnnnnnnnnnnnnnnnnnnnnnnnnnnnnnnnnnnnnnnnnnnnnnnnnnnnnnnnnnnnnnnnnnnnnnnnnnnnnnnnnnnnnnnnnnnnnnnnnnnnnnnnnnnnnnnnnnnnnnnnnnnnnnnnnnnnnnnnnnnnnnnnnnnnnnnnnnnnnnnnnnnnnnnnnnnnnnnnnnnnnnnnnnnnnnnnnnnnnnnnnnnnnnnnnnnnnnnnnnnnnnnnnnnnnnnnnnnnnnnnnnnnnnnnnnnnnnnnnnnnnnnnnnnnnnnnnnnnnnnnnnnnnnnnnnnnnnnnnnnnnnnnnnnnnnnnnnnnnnnnnnnnnnnnnnnnnnnnnnnnnnnnnnnnnnnnnnnnnnnnnnnnnnnnnnnnnnnnnnnnnnnnnnnnnnnnnnnnnnnnnnnnnnnnnnnnnnnnnnnnnnnnnnnnnnnnnnnnnnnnnnnnnnnnnnnnnnnnnnnnnnnnnnnnnnnnnnnnnnnnnnnnnnnnnnnnnnnnnnnnnnnnnnnnnnnnnnnnnnnnnnnnnnnnnnnnnnnnnnnnnnnnnnnnnnnnnnnnnnnnnnnnnnnnnnnnnnnnnnnnnnnnnnnnnnnnnnnnnnnnnnnnnnnnnnnnnnnnnnnnnnnnnnnnnnnnnnnnnnnnnnnnnnnnnnnnnnnnnnnnnnnnnnnnnnnnnnnnnnnnnnnnnnnnnnnnnnnnnnnnnnnnnnnnnnnnnnnnnnnnnnnnnnnnnnnnnnnnnnnnnnnnnnnnnnnnnnnnnnnnnnnnnnnnnnnnnnnnnnnnnnnnnnnnnnnnnnnnnnnnnnnnnnnnnnnnnnnnnnnnnnnnnnnnnnnnnnnnnnnnnnnnnnnnnnnnnnnnnnnnnnnnnnnnnnnnnnnnnnnnnnnnnnnnnnnnnnnnnnnnnnnnnnnnnnnnnnnnnnnnnnnnnnnnnnnnnnnnnnnnnnnnnnnnnnnnnnnnnnnnnnnnnnnnnnnnnnnnnnnnnnnnnnnnnnnnnnnnnnnnnnnnnnnnnnnnnnnnnnnnnnnnnnnnnnnnnnnnnnnnnnnnnnnnnnnnnnnnnnnnnnnnnnnnnnnnnnnnnnnnnnnnnnnnnnnnnnnnnnnnnnnnnnnnnnnnnnnnnnnnnnnnnnnnnnnnnnnnnnnnnnnnnnnnnnnnnnnnnnnnnnnnnnnnnnnnnnnnnnnnnnnnnnnnnnnnnnnnnnnnnnnnnnnnnnnnnnnnnnnnnnnnnnnnnnnnnnnnnnnnnnnnnnnnnnnnnnnnnnnnnnnnnnnnnnnnnnnnnnnnnnnnnnnnnnnnnnnnnnnnnnnnnnnnnnnnnnnnnnnnnnnnnnnnnnnnnnnnnnnnnnnnnnnnnnnnnnnnnnnnnnnnnnnnnnnnnnnnnnnnnnnnnnnnnnnnnnnnnnnnnnnnnnnnnnnnnnnnnnnnnnnnnnnnnnnnnnnnnnnnnnnnnnnnnnnnnnnnnnnnnnnnnnnnnnnnnnnnnnnnnnnnnnnnnnnnnnnnnnnnnnnnnnnnnnnnnnnnnnnnnnnnnnnnnnnnnnnnnnnnnnnnnnnnnnnnnnnnnnnnnnnnnnnnnnnnnnnnnnnnnnnnnnnnnnnnnnnnnnnnnnnnnnnnnnnnnnnnnnnnnnnnnnnnnnnnnnnnnnnnnnnnnnnnnnnnnnnnnnnnnnnnnnnnnnnnnnnnnnnnnnnnnnnnnnnnnnnnnnnnnnnnnnnnnnnnnnnnnnnnnnnnnnnnnnnnnnnnnnnnnnnnnnnnnnnnnnnnnnnnnnnnnnnnnnnnnnnnnnnnnnnnnnnnnnnnnnnnnnnnnnnnnnnnnnnnnnnnnnnnnnnnnnnnnnnnnnnnnnnnnnnnnnnnnnnnnnnnnnnnnnnnnnnnnnnnnnnnnnnnnnnnnnnnnnnnnnnnnnnnnnnnnnnnnnnnnnnnnnnnnnnnnnnnnnnnnnnnnnnnnnnnnnnnnnnnnnnnnnnnnnnnnnnnnnnnnnnnnnnnnnnnnnnnnnnnnnnnnnnnnnnnnnnnnnnnnnnnnnnnnnnnnnnnnnnnnnnnnnnnnnnnnnnnnnnnnnnnnnnnnnnnnnnnnnnnnnnnnnnnnnnnnnnnnnnnnnnnnnnnnnnnnnnnnnnnnnnnnnnnnnnnnnnnnnnnnnnnnnnnnnnnnnnnnnnnnnnnnnnnnnnnnnnnnnnnnnnnnnnnnnnnnnnnnnnnnnnnnnnnnnnnnnnnnnnnnnnnnnnnnnnnnnnnnnnnnnnnnnnnnnnnnnnnnnnnnnnnnnnnnnnnnnnnnnnnnnnnnnnnnnnnnnnnnnnnnnnnnnnnnnnnnnnnnnnnnnnnnnnnnnnnnnnnnnnnnnnnnnnnnnnnnnnnnnnnnnnnnnnnnnnnnnnnnnnnnnnnnnnnnnnnnnnnnnnnnnnnnnnnnnnnnnnnnnnnnnnnnnnnnnnnnnnnnnnnnnnnnnnnnnnnnnnnnnnnnnnnnnnnnnnnnnnnnnnnnnnnnnnnnnnnnnnnnnnnnnnnnnnnnnnnnnnnnnnnnnnnnnnnnnnnnnnnnnnnnnnnnnnnnnnnnnnnnnnnnnnnnnnnnnnnnnnnnnnnnnnnnnnnnnnnnnnnnnnnnnnnnnnnnnnnnnnnnnnnnnnnnnnnnnnnnnnnnnnnnnnnnnnnnnnnnnnnnnnnnnnnnnnnnnnnnnnnnnnnnnnnnnnnnnnnnnnnnnnnnnnnnnnnnnnnnnnnnnnnnnnnnnnnnnnnnnnnnnnnnnnnnnnnnnnnnnnnnnnnnnnnnnnnnnnnnnnnnnnnnnnnnnnnnnnnnnnnnnnnnnnnnnnnnnnnnnnnnnnnnnnnnnnnnnnnnnnnnnnnnnnnnnnnnnnnnnnnnnnnnnnnnnnnnnnnnnnnnnnnnnnnnnnnnnnnnnnnnnnnnnnnnnnnnnnnnnnnnnnnnnnnnnnnnnnnnnnnnnnnnnnnnnnnnnnnnnnnnnnnnnnnnnnnnnnnnnnnnnnnnnnnnnnnnnnnnnnnnnnnnnnnnnnnnnnnnnnnnnnnnnnnnnnnnnnnnnnnnnnnnnnnnnnnnnnnnnnnnnnnnnnnnnnnnnnnnnnnnnnnnnnnnnnnnnnnnnnnnnnnnnnnnnnnnnnnnnnnnnnnnnnnnnnnnnnnnnnnnnnnnnnnnnnnnnnnnnnnnnnnnnnnnnnnnnnnnnnnnnnnnnnnnnnnnnnnnnnnnnnnnnnnnnnnnnnnnnnnnnnnnnnnnnnnnnnnnnnnnnnnnnnnnnnnnnnnnnnnnnnnnnnnnnnnnnnnnnnnnnnnnnnnnnnnnnnnnnnnnnnnnnnnnnnnnnnnnnnnnnnnnnnnnnnnnnnnnnnnnnnnnnnnnnnnnnnnnnnnnnnnnnnnnnnnnnnnnnnnnnnnnnnnnnnnnnnnnnnnnnnnnnnnnnnnnnnnnnnnnnnnnnnnnnnnnnnnnnnnnnnnnnnnnnnnnnnnnnnnnnnnnnnnnnnnnnnnnnnnnnnnnnnnnnnnnnnnnnnnnnnnnnnnnnnnnnnnnnnnnnnnnnnnnnnnnnnnnnnnnnnnnnnnnnnnnnnnnnnnnnnnnnnnnnnnnnnnnnnnnnnnnnnnnnnnnnnnnnnnnnnnnnnnnnnnnnnnnnnnnnnnnnnnnnnnnnnnnnnnnnnnnnnnnnnnnnnnnnnnnnnnnnnnnnnnnnnnnnnnnnnnnnnnnnnnnnnnnnnnnnnnnnnnnnnnnnnnnnnnnnnnnnnnnnnnnnnnnnnnnnnnnnnnnnnnnnnnnnnnnnnnnnnnnnnnnnnnnnnnnnnnnnnnnnnnnnnnnnnnnnnnnnnnnnnnnnnnnnnnnnnnnnnnnnnnnnnnnnnnnnnnnnnnnnnnnnnnnnnnnnnnnnnnnnnnnnnnnnnnnnnnnnnnnnnnnnnnnnnnnnnnnnnnnnnnnnnnnnnnnnnnnnnnnnnnnnnnnnnnnnnnnnnnnnnnnnnnnnnnnnnnnnnnnnnnnnnnnnnnnnnnnnnnnnnnnnnnnnnnnnnnnnnnnnnnnnnnnnnnnnnnnnnnnnnnnnnnnnnnnnnnnnnnnnnnnnnnnnnnnnnnnnnnnnnnnnnnnnnnnnnnnnnnnnnnnnnnnnnnnnnnnnnnnnnnnnnnnnnnnnnnnnnnnnnnnnnnnnnnnnnnnnnnnnnnnnnnnnnnnnnnnnnnnnnnnnnnnnnnnnnnnnnnnnnnnnnnnnnnnnnnnnnnnnnnnnnnnnnnnnnnnnnnnnnnnnnnnnnnnnnnnnnnnnnnnnnnnnnnnnnnnnnnnnnnnnnnnnnnnnnnnnnnnnnnnnnnnnnnnnnnnnnnnnnnnnnnnnnnnnnnnnnnnnnnnnnnnnnnnnnnnnnnnnnnnnnnnnnnnnnnnnnnnnnnnnnnnnnnnnnnnnnnnnnnnnnnnnnnnnnnnnnnnnnnnnnnnnnnnnnnnnnnnnnnnnnnnnnnnnnnnnnnnnnnnnnnnnnnnnnnnnnnnnnnnnnnnnnnnnnnnnnnnnnnnnnnnnnnnnnnnnnnnnnnnnnnnnnnnnnnnnnnnnnnnnnnnnnnnnnnnnnnnnnnnnnnnnnnnnnnnnnnnnnnnnnnnnnnnnnnnnnnnnnnnnnnnnnnnnnnnnnnnnnnnnnnnnnnnnnnnnnnnnnnnnnnnnnnnnnnnnnnnnnnnnnnnnnnnnnnnnnnnnnnnnnnnnnnnnnnnnnnnnnnnnnnnnnnnnnnnnnnnnnnnnnnnnnnnnnnnnnnnnnnnnnnnnnnnnnnnnnnnnnnnnnnnnnnnnnnnnnnnnnnnnnnnnnnnnnnnnnnnnnnnnnnnnnnnnnnnnnnnnnnnnnnnnnnnnnnnnnnnnnnnnnnnnnnnnnnnnnnnnnnnnnnnnnnnnnnnnnnnnnnnnnnnnnnnnnnnnnnnnnnnnnnnnnnnnnnnnnnnnnnnnnnnnnnnnnnnnnnnnnnnnnnnnnnnnnnnnnnnnnnnnnnnnnnnnnnnnnnnnnnnnnnnnnnnnnnnnnnnnnnnnnnnnnnnnnnnnnnnnnnnnnnnnnnnnnnnnnnnnnnnnnnnnnnnnnnnnnnnnnnnnnnnnnnnnnnnnnnnnnnnnnnnnnnnnnnnnnnnnnnnnnnnnnnnnnnnnnnnnnnnnnnnnnnnnnnnnnnnnnnnnnnnnnnnnnnnnnnnnnnnnnnnnnnnnnnnnnnnnnnnnnnnnnnnnnnnnnnnnnnnnnnnnnnnnnnnnnnnnnnnnnnnnnnnnnnnnnnnnnnnnnnnnnnnnnnnnnnnnnnnnnnnnnnnnnnnnnnnnnnnnnnnnnnnnnnnnnnnnnnnnnnnnnnnnnnnnnnnnnnnnnnnnnnnnnnnnnnnnnnnnnnnnnnnnnnnnnnnnnnnnnnnnnnnnnnnnnnnnnnnnnnnnnnnnnnnnnnnnnnnnnnnnnnnnnnnnnnnnnnnnnnnnnnnnnnnnnnnnnnnnnnnnnnnnnnnnnnnnnnnnnnnnnnnnnnnnnnnnnnnnnnnnnnnnnnnnnnnnnnnnnnnnnnnnnnnnnnnnnnnnnnnnnnnnnnnnnnnnnnnnnnnnnnnnnnnnnnnnnnnnnnnnnnnnnnnnnnnnnnnnnnnnnnnnnnnnnnnnnnnnnnnnnnnnnnnnnnnnnnnnnnnnnnnnnnnnnnnnnnnnnnnnnnnnnnnnnnnnnnnnnnnnnnnnnnnnnnnnnnnnnnnnnnnnnnnnnnnnnnnnnnnnnnnnnnnnnnnnnnnnnnnnnnnnnnnnnnnnnnnnnnnnnnnnnnnnnnnnnnnnnnnnnnnnnnnnnnnnnnnnnnnnnnnnnnnnnnnnnnnnnnnnnnnnnnnnnnnnnnnnnnnnnnnnnnnnnnnnnnnnnnnnnnnnnnnnnnnnnnnnnnnnnnnnnnnnnnnnnnnnnnnnnnnnnnnnnnnnnnnnnnnnnnnnnnnnnnnnnnnnnnnnnnnnnnnnnnnnnnnnnnnnnnnnnnnnnnnnnnnnnnnnnnnnnnnnnnnnnnnnnnnnnnnnnnnnnnnnnnnnnnnnnnnnnnnnnnnnnnnnnnnnnnnnnnnnnnnnnnnnnnnnnnnnnnnnnnnnnnnnnnnnnnnnnnnnnnnnnnnnnnnnnnnnnnnnnnnnnnnnnnnnnnnnnnnnnnnnnnnnnnnnnnnnnnnnnnnnnnnnnnnnnnnnnnnnnnnnnnnnnnnnnnnnnnnnnnnnnnnnnnnnnnnnnnnnnnnnnnnnnnnnnnnnnnnnnnnnnnnnnnnnnnnnnnnnnnnnnnnnnnnnnnnnnnnnnnnnnnnnnnnnnnnnnnnnnnnnnnnnnnnnnnnnnnnnnnnnnnnnnnnnnnnnnnnnnnnnnnnnnnnnnnnnnnnnnnnnnnnnnnnnnnnnnnnnnnnnnnnnnnnnnnnnnnnnnnnnnnnnnnnnnnnnnnnnnnnnnnnnnnnnnnnnnnnnnnnnnnnnnnnnnnnnnnnnnnnnnnnnnnnnnnnnnnnnnnnnnnnnnnnnnnnnnnnnnnnnnnnnnnnnnnnnnnnnnnnnnnnnnnnnnnnnnnnnnnnnnnnnnnnnnnnnnnnnnnnnnnnnnnnnnnnnnnnnnnnnnnnnnnnnnnnnnnnnnnnnnnnnnnnnnnnnnnnnnnnnnnnnnnnnnnnnnnnnnnnnnnnnnnnnnnnnnnnnnnnnnnnnnnnnnnnnnnnnnnnnnnnnnnnnnnnnnnnnnnnnnnnnnnnnnnnnnnnnnnnnnnnnnnnnnnnnnnnnnnnnnnnnnnnnnnnnnnnnnnnnnnnnnnnnnnnnnnnnnnnnnnnnnnnnnnnnnnnnnnnnnnnnnnnnnnnnnnnnnnnnnnnnnnnnnnnnnnnnnnnnnnnnnnnnnnnnnnnnnnnnnnnnnnnnnnnnnnnnnnnnnnnnnnnnnnnnnnnnnnnnnnnnnnnnnnnnnnnnnnnnnnnnnnnnnnnnnnnnnnnnnnnnnnnnnnnnnnnnnnnnnnnnnnnnnnnnnnnnnnnnnnnnnnnnnnnnnnnnnnnnnnnnnnnnnnnnnnnnnnnnnnnnnnnnnnnnnnnnnnnnnnnnnnnnnnnnnnnnnnnnnnnnnnnnnnnnnnnnnnnnnnnnnnnnnnnnnnnnnnnnnnnnnnnnnnnnnnnnnnnnnnnnnnnnnnnnnnnnnnnnnnnnnnnnnnnnnnnnnnnnnnnnnnnnnnnnnnnnnnnnnnnnnnnnnnnnnnnnnnnnnnnnnnnnnnnnnnnnnnnnnnnnnnnnnnnnnnnnnnnnnnnnnnnnnnnnnnnnnnnnnnnnnnnnnnnnnnnnnnnnnnnnnnnnnnnnnnnnnnnnnnnnnnnnnnnnnnnnnnnnnnnnnnnnnnnnnnnnnnnnnnnnnnnnnnnnnnnnnnnnnnnnnnnnnnnnnnnnnnnnnnnnnnnnnnnnnnnnnnnnnnnnnnnnnnnnnnnnnnnnnnnnnnnnnnnnnnnnnnnnnnnnnnnnnnnnnnnnnnnnnnnnnnnnnnnnnnnnnnnnnnnnnnnnnnnnnnnnnnnnnnnnnnnnnnnnnnnnnnnnnnnnnnnnnnnnnnnnnnnnnnnnnnnnnnnnnnnnnnnnnnnnnnnnnnnnnnnnnnnnnnnnnnnnnnnnnnnnnnnnnnnnnnnnnnnnnnnnnnnnnnnnnnnnnnnnnnnnnnnnnnnnnnnnnnnnnnnnnnnnnnnnnnnnnnnnnnnnnnnnnnnnnnnnnnnnnnnnnnnnnnnnnnnnnnnnnnnnnnnnnnnnnnnnnnnnnnnnnnnnnnnnnnnnnnnnnnnnnnnnnnnnnnnnnnnnnnnnnnnnnnnnnnnnnnnnnnnnnnnnnnnnnnnnnnnnnnnnnnnnnnnnnnnnnnnnnnnnnnnnnnnnnnnnnnnnnnnnnnnnnnnnnnnnnnnnnnnnnnnnnnnnnnnnnnnnnnnnnnnnnnnnnnnnnnnnnnnnnnnnnnnnnnnnnnnnnnnnnnnnnnnnnnnnnnnnnnnnnnnnnnnnnnnnnnnnnnnnnnnnnnnnnnnnnnnnnnnnnnnnnnnnnnnnnnnnnnnnnnnnnnnnnnnnnnnnnnnnnnnnnnnnnnnnnnnnnnnnnnnnnnnnnnnnnnnnnnnnnnnnnnnnnnnnnnnnnnnnnnnnnnnnnnnnnnnnnnnnnnnnnnnnnnnnnnnnnnnnnnnnnnnnnnnnnnnnnnnnnnnnnnnnnnnnnnnnnnnnnnnnnnnnnnnnnnnnnnnnnnnnnnnnnnnnnnnnnnnnnnnnnnnnnnnnnnnnnnnnnnnnnnnnnnnnnnnnnnnnnnnnnnnnnnnnnnnnnnnnnnnnnnnnnnnnnnnnnnnnnnnnnnnnnnnnnnnnnnnnnnnnnnnnnnnnnnnnnnnnnnnnnnnnnnnnnnnnnnnnnnnnnnnnnnnnnnnnnnnnnnnnnnnnnnnnnnnnnnnnnnnnnnnnnnnnnnnnnnnnnnnnnnnnnnnnnnnnnnnnnnnnnnnnnnnnnnnnnnnnnnnnnnnnnnnnnnnnnnnnnnnnnnnnnnnnnnnnnnnnnnnnnnnnnnnnnnnnnnnnnnnnnnnnnnnnnnnnnnnnnnnnnnnnnnnnnnnnnnnnnnnnnnnnnnnnnnnnnnnnnnnnnnnnnnnnnnnnnnnnnnnnnnnnnnnnnnnnnnnnnnnnnnnnnnnnnnnnnnnnnnnnnnnnnnnnnnnnnnnnnnnnnnnnnnnnnnnnnnnnnnnnnnnnnnnnnnnnnnnnnnnnnnnnnnnnnnnnnnnnnnnnnnnnnnnnnnnnnnnnnnnnnnnnnnnnnnnnnnnnnnnnnnnnnnnnnnnnnnnnnnnnnnnnnnnnnnnnnnnnnnnnnnnnnnnnnnnnnnnnnnnnnnnnnnnnnnnnnnnnnnnnnnnnnnnnnnnnnnnnnnnnnnnnnnnnnnnnnnnnnnnnnnnnnnnnnnnnnnnnnnnnnnnnnnnnnnnnnnnnnnnnnnnnnnnnnnnnnnnnnnnnnnnnnnnnnnnnnnnnnnnnnnnnnnnnnnnnnnnnnnnnnnnnnnnnnnnnnnnnnnnnnnnnnnnnnnnnnnnnnnnnnnnnnnnnnnnnnnnnnnnnnnnnnnnnnnnnnnnnnnnnnnnnnnnnnnnnnnnnnnnnnnnnnnnnnnnnnnnnnnnnnnnnnnnnnnnnnnnnnnnnnnnnnnnnnnnnnnnnnnnnnnnnnnnnnnnnnnnnnnnnnnnnnnnnnnnnnnnnnnnnnnnnnnnnnnnnnnnnnnnnnnnnnnnnnnnnnnnnnnnnnnnnnnnnnnnnnnnnnnnnnnnnnnnnnnnnnnnnnnnnnnnnnnnnnnnnnnnnnnnnnnnnnnnnnnnnnnnnnnnnnnnnnnnnnnnnnnnnnnnnnnnnnnnnnnnnnnnnnnnnnnnnnnnnnnnnnnnnnnnnnnnnnnnnnnnnnnnnnnnnnnnnnnnnnnnnnnnnnnnnnnnnnnnnnnnnnnnnnnnnnnnnnnnnnnnnnnnnnnnnnnnnnnnnnnnnnnnnnnnnnnnnnnnnnnnnnnnnnnnnnnnnnnnnnnnnnnnnnnnnnnnnnnnnnnnnnnnnnnnnnnnnnnnnnnnnnnnnnnnnnnnnnnnnnnnnnnnnnnnnnnnnnnnnnnnnnnnnnnnnnnnnnnnnnnnnnnnnnnnnnnnnnnnnnnnnnnnnnnnnnnnnnnnnnnnnnnnnnnnnnnnnnnnnnnnnnnnnnnnnnnnnnnnnnnnnnnnnnnnnnnnnnnnnnnnnnnnnnnnnnnnnnnnnnnnnnnnnnnnnnnnnnnnnnnnnnnnnnnnnnnnnnnnnnnnnnnnnnnnnnnnnnnnnnnnnnnnnnnnnnnnnnnnnnnnnnnnnnnnnnnnnnnnnnnnnnnnnnnnnnnnnnnnnnnnnnnnnnnnnnnnnnnnnnnnnnnnnnnnnnnnnnnnnnnnnnnnnnnnnnnnnnnnnnnnnnnnnnnnnnnnnnnnnnnnnnnnnnnnnnnnnnnnnnnnnnnnnnnnnnnnnnnnnnnnnnnnnnnnnnnnnnnnnnnnnnnnnnnnnnnnnnnnnnnnnnnnnnnnnnnnnnnnnnnnnnnnnnnnnnnnnnnnnnnnnnnnnnnnnnnnnnnnnnnnnnnnnnnnnnnnnnnnnnnnnnnnnnnnnnnnnnnnnnnnnnnnnnnnnnnnnnnnnnnnnnnnnnnnnnnnnnnnnnnnnnnnnnnnnnnnnnnnnnnnnnnnnnnnnnnnnnnnnnnnnnnnnnnnnnnnnnnnnnnnnnnnnnnnnnnnnnnnnnnnnnnnnnnnnnnnnnnnnnnnnnnnnnnnnnnnnnnnnnnnnnnnnnnnnnnnnnnnnnnnnnnnnnnnnnnnnnnnnnnnnnnnnnnnnnnnnnnnnnnnnnnnnnnnnnnnnnnnnnnnnnnnnnnnnnnnnnnnnnnnnnnnnnnnnnnnnnnnnnnnnnnnnnnnnnnnnnnnnnnnnnnnnnnnnnnnnnnnnnnnnnnnnnnnnnnnnnnnnnnnnnnnnnnnnnnnnnnnnnnnnnnnnnnnnnnnnnnnnnnnnnnnnnnnnnnnnnnnnnnnnnnnnnnnnnnnnnnnnnnnnnnnnnnnnnnnnnnnnnnnnnnnnnnnnnnnnnnnnnnnnnnnnnnnnnnnnnnnnnnnnnnnnnnnnnnnnnnnnnnnnnnnnnnnnnnnnnnnnnnnnnnnnnnnnnnnnnnnnnnnnnnnnnnnnnnnnnnnnnnnnnnnnnnnnnnnnnnnnnnnnnnnnnnnnnnnnnnnnnnnnnnnnnnnnnnnnnnnnnnnnnnnnnnnnnnnnnnnnnnnnnnnnnnnnnnnnnnnnnnnnnnnnnnnnnnnnnnnnnnnnnnnnnnnnnnnnnnnnnnnnnnnnnnnnnnnnnnnnnnnnnnnnnnnnnnnnnnnnnnnnnnnnnnnnnnnnnnnnnnnnnnnnnnnnnnnnnnnnnnnnnnnnnnnnnnnnnnnnnnnnnnnnnnnnnnnnnnnnnnnnnnnnnnnnnnnnnnnnnnnnnnnnnnnnnnnnnnnnnnnnnnnnnnnnnnnnnnnnnnnnnnnnnnnnnnnnnnnnnnnnnnnnnnnnnnnnnnnnnnnnnnnnnnnnnnnnnnnnnnnnnnnnnnnnnnnnnnnnnnnnnnnnnnnnnnnnnnnnnnnnnnnnnnnnnnnnnnnnnnnnnnnnnnnnnnnnnnnnnnnnnnnnnnnnnnnnnnnnnnnnnnnnnnnnnnnnnnnnnnnnnnnnnnnnnnnnnnnnnnnnnnnnnnnnnnnnnnnnnnnnnnnnnnnnnnnnnnnnnnnnnnnnnnnnnnnnnnnnnnnnnnnnnnnnnnnnnnnnnnnnnnnnnnnnnnnnnnnnnnnnnnnnnnnnnnnnnnnnnnnnnnnnnnnnnnnnnnnnnnnnnnnnnnnnnnnnnnnnnnnnnnnnnnnnnnnnnnnnnnnnnnnnnnnnnnnnnnnnnnnnnnnnnnnnnnnnnnnnnnnnnnnnnnnnnnnnnnnnnnnnnnnnnnnnnnnnnnnnnnnnnnnnnnnnnnnnnnnnnnnnnnnnnnnnnnnnnnnnnnnnnnnnnnnnnnnnnnnnnnnnnnnnnnnnnnnnnnnnnnnnnnnnnnnnnnnnnnnnnnnnnnnnnnnnnnnnnnnnnnnnnnnnnnnnnnnnnnnnnnnnnnnnnnnnnnnnnnnnnnnnnnnnnnnnnnnnnnnnnnnnnnnnnnnnnnnnnnnnnnnnnnnnnnnnnnnnnnnnnnnnnnnnnnnnnnnnnnnnnnnnnnnnnnnnnnnnnnnnnnnnnnnnnnnnnnnnnnnnnnnnnnnnnnnnnnnnnnnnnnnnnnnnnnnnnnnnnnnnnnnnnnnnnnnnnnnnnnnnnnnnnnnnnnnnnnnnnnnnnnnnnnnnnnnnnnnnnnnnnnnnnnnnnnnnnnnnnnnnnnnnnnnnnnnnnnnnnnnnnnnnnnnnnnnnnnnnnnnnnnnnnnnnnnnnnnnnnnnnnnnnnnnnnnnnnnnnnnnnnnnnnnnnnnnnnnnnnnnnnnnnnnnnnnnnnnnnnnnnnnnnnnnnnnnnnnnnnnnnnnnnnnnnnnnnnnnnnnnnnnnnnnnnnnnnnnnnnnnnnnnnnnnnnnnnnnnnnnnnnnnnnnnnnnnnnnnnnnnnnnnnnnnnnnnnnnnnnnnnnnnnnnnnnnnnnnnnnnnnnnnnnnnnnnnnnnnnnnnnnnnnnnnnnnnnnnnnnnnnnnnnnnnnnnnnnnnnnnnnnnnnnnnnnnnnnnnnnnnnnnnnnnnnnnnnnnnnnnnnnnnnnnnnnnnnnnnnnnnnnnnnnnnnnnnnnnnnnnnnnnnnnnnnnnnnnnnnnnnnnnnnnnnnnnnnnnnnnnnnnnnnnnnnnnnnnnnnnnnnnnnnnnnnnnnnnnnnnnnnnnnnnnnnnnnnnnnnnnnnnnnnnnnnnnnnnnnnnnnnnnnnnnnnnnnnnnnnnnnnnnnnnnnnnnnnnnnnnnnnnnnnnnnnnnnnnnnnnnnnnnnnnnnnnnnnnnnnnnnnnnnnnnnnnnnnnnnnnnnnnnnnnnnnnnnnnnnnnnnnnnnnnnnnnnnnnnnnnnnnnnnnnnnnnnnnnnnnnnnnnnnnnnnnnnnnnnnnnnnnnnnnnnnnnnnnnnnnnnnnnnnnnnnnnnnnnnnnnnnnnnnnnnnnnnnnnnnnnnnnnnnnnnnnnnnnnnnnnnnnnnnnnnnnnnnnnnnnnnnnnnnnnnnnnnnnnnnnnnnnnnnnnnnnnnnnnnnnnnnnnnnnnnnnnnnnnnnnnnnnnnnnnnnnnnnnnnnnnnnnnnnnnnnnnnnnnnnnnnnnnnnnnnnnnnnnnnnnnnnnnnnnnnnnnnnnnnnnnnnnnnnnnnnnnnnnnnnnnnnnnnnnnnnnnnnnnnnnnnnnnnnnnnnnnnnnnnnnnnnnnnnnnnnnnnnnnnnnnnnnnnnnnnnnnnnnnnnnnnnnnnnnnnnnnnnnnnnnnnnnnnnnnnnnnnnnnnnnnnnnnnnnnnnnnnnnnnnnnnnnnnnnnnnnnnnnnnnnnnnnnnnnnnnnnnnnnnnnnnnnnnnnnnnnnnnnnnnnnnnnnnnnnnnnnnnnnnnnnnnnnnnnnnnnnnnnnnnnnnnnnnnnnnnnnnnnnnnnnnnnnnnnnnnnnnnnnnnnnnnnnnnnnnnnnnnnnnnnnnnnnnnnnnnnnnnnnnnnnnnnnnnnnnnnnnnnnnnnnnnnnnnnnnnnnnnnnnnnnnnnnnnnnnnnnnnnnnnnnnnnnnnnnnnnnnnnnnnnnnnnnnnnnnnnnnnnnnnnnnnnnnnnnnnnnnnnnnnnnnnnnnnnnnnnnnnnnnnnnnnnnnnnnnnnnnnnnnnnnnnnnnnnnnnnnnnnnnnnnnnnnnnnnnnnnnnnnnnnnnnnnnnnnnnnnnnnnnnnnnnnnnnnnnnnnnnnnnnnnnnnnnnnnnnnnnnnnnnnnnnnnnnnnnnnnnnnnnnnnnnnnnnnnnnnnnnnnnnnnnnnnnnnnnnnnnnnnnnnnnnnnnnnnnnnnnnnnnnnnnnnnnnnnnnnnnnnnnnnnnnnnnnnnnnnnnnnnnnnnnnnnnnnnnnnnnnnnnnnnnnnnnnnnnnnnnnnnnnnnnnnnnnnnnnnnnnnnnnnnnnnnnnnnnnnnnnnnnnnnnnnnnnnnnnnnnnnnnnnnnnnnnnnnnnnnnnnnnnnnnnnnnnnnnnnnnnnnnnnnnnnnnnnnnnnnnnnnnnnnnnnnnnnnnnnnnnnnnnnnnnnnnnnnnnnnnnnnnnnnnnnnnnnnnnnnnnnnnnnnnnnnnnnnnnnnnnnnnnnnnnnnnnnnnnnnnnnnnnnnnnnnnnnnnnnnnnnnnnnnnnnnnnnnnnnnnnnnnnnnnnnnnnnnnnnnnnnnnnnnnnnnnnnnnnnnnnnnnnnnnnnnnnnnnnnnnnnnnnnnnnnnnnnnnnnnnnnnnnnnnnnnnnnnnnnnnnnnnnnnnnnnnnnnnnnnnnnnnnnnnnnnnnnnnnnnnnnnnnnnnnnnnnnnnnnnnnnnnnnnnnnnnnnnnnnnnnnnnnnnnnnnnnnnnnnnnnnnnnnnnnnnnnnnnnnnnnnnnnnnnnnnnnnnnnnnnnnnnnnnnnnnnnnnnnnnnnnnnnnnnnnnnnnnnnnnnnnnnnnnnnnnnnnnnnnnnnnnnnnnnnnnnnnnnnnnnnnnnnnnnnnnnnnnnnnnnnnnnnnnnnnnnnnnnnnnnnnnnnnnnnnnnnnnnnnnnnnnnnnnnnnnnnnnnnnnnnnnnnnnnnnnnnnnnnnnnnnnnnnnnnnnnnnnnnnnnnnnnnnnnnnnnnnnnnnnnnnnnnnnnnnnnnnnnnnnnnnnnnnnnnnnnnnnnnnnnnnnnnnnnnnnnnnnnnnnnnnnnnnnnnnnnnnnnnnnnnnnnnnnnnnnnnnnnnnnnnnnnnnnnnnnnnnnnnnnnnnnnnnnnnnnnnnnnnnnnnnnnnnnnnnnnnnnnnnnnnnnnnnnnnnnnnnnnnnnnnnnnnnnnnnnnnnnnnnnnnnnnnnnnnnnnnnnnnnnnnnnnnnnnnnnnnnnnnnnnnnnnnnnnnnnnnnnnnnnnnnnnnnnnnnnnnnnnnnnnnnnnnnnnnnnnnnnnnnnnnnnnnnnnnnnnnnnnnnnnnnnnnnnnnnnnnnnnnnnnnnnnnnnnnnnnnnnnnnnnnnnnnnnnnnnnnnnnnnnnnnnnnnnnnnnnnnnnnnnnnnnnnnnnnnnnnnnnnnnnnnnnnnnnnnnnnnnnnnnnnnnnnnnnnnnnnnnnnnnnnnnnnnnnnnnnnnnnnnnnnnnnnnnnnnnnnnnnnnnnnnnnnnnnnnnnnnnnnnnnnnnnnnnnnnnnnnnnnnnnnnnnnnnnnnnnnnnnnnnnnnnnnnnnnnnnnnnnnnnnnnnnnnnnnnnnnnnnnnnnnnnnnnnnnnnnnnnnnnnnnnnnnnnnnnnnnnnnnnnnnnnnnnnnnnnnnnnnnnnnnnnnnnnnnnnnnnnnnnnnnnnnnnnnnnnnnnnnnnnnnnnnnnnnnnnnnnnnnnnnnnnnnnnnnnnnnnnnnnnnnnnnnnnnnnnnnnnnnnnnnnnnnnnnnnnnnnnnnnnnnnnnnnnnnnnnnnnnnnnnnnnnnnnnnnnnnnnnnnnnnnnnnnnnnnnnnnnnnnnnnnnnnnnnnnnnnnnnnnnnnnnnnnnnnnnnnnnnnnnnnnnnnnnnnnnnnnnnnnnnnnnnnnnnnnnnnnnnnnnnnnnnnnnnnnnnnnnnnnnnnnnnnnnnnnnnnnnnnnnnnnnnnnnnnnnnnnnnnnnnnnnnnnnnnnnnnnnnnnnnnnnnnnnnnnnnnnnnnnnnnnnnnnnnnnnnnnnnnnnnnnnnnnnnnnnnnnnnnnnnnnnnnnnnnnnnnnnnnnnnnnnnnnnnnnnnnnnnnnnnnnnnnnnnnnnnnnnnnnnnnnnnnnnnnnnnnnnnnnnnnnnnnnnnnnnnnnnnnnnnnnnnnnnnnnnnnnnnnnnnnnnnnnnnnnnnnnnnnnnnnnnnnnnnnnnnnnnnnnnnnnnnnnnnnnnnnnnnnnnnnnnnnnnnnnnnnnnnnnnnnnnnnnnnnnnnnnnnnnnnnnnnnnnnnnnnnnnnnnnnnnnnnnnnnnnnnnnnnnnnnnnnnnnnnnnnnnnnnnnnnnnnnnnnnnnnnnnnnnnnnnnnnnnnnnnnnnnnnnnnnnnnnnnnnnnnnnnnnnnnnnnnnnnnnnnnnnnnnnnnnnnnnnnnnnnnnnnnnnnnnnnnnnnnnnnnnnnnnnnnnnnnnnnnnnnnnnnnnnnnnnnnnnnnnnnnnnnnnnnnnnnnnnnnnnnnnnnnnnnnnnnnnnnnnnnnnnnnnnnnnnnnnnnnnnnnnnnnnnnnnnnnnnnnnnnnnnnnnnnnnnnnnnnnnnnnnnnnnnnnnnnnnnnnnnnnnnnnnnnnnnnnnnnnnnnnnnnnnnnnnnnnnnnnnnnnnnnnnnnnnnnnnnnnnnnnnnnnnnnnnnnnnnnnnnnnnnnnnnnnnnnnnnnnnnnnnnnnnnnnnnnnnnnnnnnnnnnnnnnnnnnnnnnnnnnnnnnnnnnnnnnnnnnnnnnnnnnnnnnnnnnnnnnnnnnnnnnnnnnnnnnnnnnnnnnnnnnnnnnnnnnnnnnnnnnnnnnnnnnnnnnnnnnnnnnnnnnnnnnnnnnnnnnnnnnnnnnnnnnnnnnnnnnnnnnnnnnnnnnnnnnnnnnnnnnnnnnnnnnnnnnnnnnnnnnnnnnnnnnnnnnnnnnnnnnnnnnnnnnnnnnnnnnnnnnnnnnnnnnnnnnnnnnnnnnnnnnnnnnnnnnnnnnnnnnnnnnnnnnnnnnnnnnnnnnnnnnnnnnnnnnnnnnnnnnnnnnnnnnnnnnnnnnnnnnnnnnnnnnnnnnnnnnnnnnnnnnnnnnnnnnnnnnnnnnnnnnnnnnnnnnnnnnnnnnnnnnnnnnnnnnnnnnnnnnnnnnnnnnnnnnnnnnnnnnnnnnnnnnnnnnnnnnnnnnnnnnnnnnnnnnnnnnnnnnnnnnnnnnnnnnnnnnnnnnnnnnnnnnnnnnnnnnnnnnnnnnnnnnnnnnnnnnnnnnnnnnnnnnnnnnnnnnnnnnnnnnnnnnnnnnnnnnnnnnnnnnnnnnnnnnnnnnnnnnnnnnnnnnnnnnnnnnnnnnnnnnnnnnnnnnnnnnnnnnnnnnnnnnnnnnnnnnnnnnnnnnnnnnnnnnnnnnnnnnnnnnnnnnnnnnnnnnnnnnnnnnnnnnnnnnnnnnnnnnnnnnnnnnnnnnnnnnnnnnnnnnnnnnnnnnnnnnnnnnnnnnnnnnnnnnnnnnnnnnnnnnnnnnnnnnnnnnnnnnnnnnnnnnnnnnnnnnnnnnnnnnnnnnnnnnnnnnnnnnnnnnnnnnnnnnnnnnnnnnnnnnnnnnnnnnnnnnnnnnnnnnnnnnnnnnnnnnnnnnnnnnnnnnnnnnnnnnnnnnnnnnnnnnnnnnnnnnnnnnnnnnnnnnnnnnnnnnnnnnnnnnnnnnnnnnnnnnnnnnnnnnnnnnnnnnnnnnnnnnnnnnnnnnnnnnnnnnnnnnnnnnnnnnnnnnnnnnnnnnnnnnnnnnnnnnnnnnnnnnnnnnnnnnnnnnnnnnnnnnnnnnnnnnnnnnnnnnnnnnnnnnnnnnnnnnnnnnnnnnnnnnnnnnnnnnnnnnnnnnnnnnnnnnnnnnnnnnnnnnnnnnnnnnnnnnnnnnnnnnnnnnnnnnnnnnnnnnnnnnnnnnnnnnnnnnnnnnnnnnnnnnnnnnnnnnnnnnnnnnnnnnnnnnnnnnnnnnnnnnnnnnnnnnnnnnnnnnnnnnnnnnnnnnnnnnnnnnnnnnnnnnnnnnnnnnnnnnnnnnnnnnnnnnnnnnnnnnnnnnnnnnnnnnnnnnnnnnnnnnnnnnnnnnnnnnnnnnnnnnnnnnnnnnnnnnnnnnnnnnnnnnnnnnnnnnnnnnnnnnnnnnnnnnnnnnnnnnnnnnnnnnnnnnnnnnnnnnnnnnnnnnnnnnnnnnnnnnnnnnnnnnnnnnnnnnnnnnnnnnnnnnnnnnnnnnnnnnnnnnnnnnnnnnnnnnnnnnnnnnnnnnnnnnnnnnnnnnnnnnnnnnnnnnnnnnnnnnnnnnnnnnnnnnnnnnnnnnnnnnnnnnnnnnnnnnnnnnnnnnnnnnnnnnnnnnnnnnnnnnnnnnnnnnnnnnnnnnnnnnnnnnnnnnnnnnnnnnnnnnnnnnnnnnnnnnnnnnnnnnnnnnnnnnnnnnnnnnnnnnnnnnnnnnnnnnnnnnnnnnnnnnnnnnnnnnnnnnnnnnnnnnnnnnnnnnnnnnnnnnnnnnnnnnnnnnnnnnnnnnnnnnnnnnnnnnnnnnnnnnnnnnnnnnnnnnnnnnnnnnnnnnnnnnnnnnnnnnnnnnnnnnnnnnnnnnnnnnnnnnnnnnnnnnnnnnnnnnnnnnnnnnnnnnnnnnnnnnnnnnnnnnnnnnnnnnnnnnnnnnnnnnnnnnnnnnnnnnnnnnnnnnnnnnnnnnnnnnnnnnnnnnnnnnnnnnnnnnnnnnnnnnnnnnnnnnnnnnnnnnnnnnnnnnnnnnnnnnnnnnnnnnnnnnnnnnnnnnnnnnnnnnnnnnnnnnnnnnnnnnnnnnnnnnnnnnnnnnnnnnnnnnnnnnnnnnnnnnnnnnnnnnnnnnnnnnnnnnnnnnnnnnnnnnnnnnnnnnnnnnnnnnnnnnnnnnnnnnnnnnnnnnnnnnnnnnnnnnnnnnnnnnnnnnnnnnnnnnnnnnnnnnnnnnnnnnnnnnnnnnnnnnnnnnnnnnnnnnnnnnnnnnnnnnnnnnnnnnnnnnnnnnnnnnnnnnnnnnnnnnnnnnnnnnnnnnnnnnnnnnnnnnnnnnnnnnnnnnnnnnnnnnnnnnnnnnnnnnnnnnnnnnnnnnnnnnnnnnnnnnnnnnnnnnnnnnnnnnnnnnnnnnnnnnnnnnnnnnnnnnnnnnnnnnnnnnnnnnnnnnnnnnnnnnnnnnnnnnnnnnnnnnnnnnnnnnnnnnnnnnnnnnnnnnnnnnnnnnnnnnnnnnnnnnnnnnnnnnnnnnnnnnnnnnnnnnnnnnnnnnnnnnnnnnnnnnnnnnnnnnnnnnnnnnnnnnnnnnnnnnnnnnnnnnnnnnnnnnnnnnnnnnnnnnnnnnnnnnnnnnnnnnnnnnnnnnnnnnnnnnnnnnnnnnnnnnnnnnnnnnnnnnnnnnnnnnnnnnnnnnnnnnnnnnnnnnnnnnnnnnnnnnnnnnnnnnnnnnnnnnnnnnnnnnnnnnnnnnnnnnnnnnnnnnnnnnnnnnnnnnnnnnnnnnnnnnnnnnnnnnnnnnnnnnnnnnnnnnnnnnnnnnnnnnnnnnnnnnnnnnnnnnnnnnnnnnnnnnnnnnnnnnnnnnnnnnnnnnnnnnnnnnnnnnnnnnnnnnnnnnnnnnnnnnnnnnnnnnnnnnnnnnnnnnnnnnnnnnnnnnnnnnnnnnnnnnnnnnnnnnnnnnnnnnnnnnnnnnnnnnnnnnnnnnnnnnnnnnnnnnnnnnnnnnnnnnnnnnnnnnnnnnnnnnnnnnnnnnnnnnnnnnnnnnnnnnnnnnnnnnnnnnnnnnnnnnnnnnnnnnnnnnnnnnnnnnnnnnnnnnnnnnnnnnnnnnnnnnnnnnnnnnnnnnnnnnnnnnnnnnnnnnnnnnnnnnnnnnnnnnnnnnnnnnnnnnnnnnnnnnnnnnnnnnnnnnnnnnnnnnnnnnnnnnnnnnnnnnnnnnnnnnnnnnnnnnnnnnnnnnnnnnnnnnnnnnnnnnnnnnnnnnnnnnnnnnnnnnnnnnnnnnnnnnnnnnnnnnnnnnnnnnnnnnnnnnnnnnnnnnnnnnnnnnnnnnnnnnnnnnnnnnnnnnnnnnnnnnnnnnnnnnnnnnnnnnnnnnnnnnnnnnnnnnnnnnnnnnnnnnnnnnnnnnnnnnnnnnnnnnnnnnnnnnnnnnnnnnnnnnnnnnnnnnnnnnnnnnnnnnnnnnnnnnnnnnnnnnnnnnnnnnnnnnnnnnnnnnnnnnnnnnnnnnnnnnnnnnnnnnnnnnnnnnnnnnnnnnnnnnnnnnnnnnnnnnnnnnnnnnnnnnnnnnnnnnnnnnnnnnnnnnnnnnnnnnnnnnnnnnnnnnnnnnnnnnnnnnnnnnnnnnnnnnnnnnnnnnnnnnnnnnnnnnnnnnnnnnnnnnnnnnnnnnnnnnnnnnnnnnnnnnnnnnnnnnnnnnnnnnnnnnnnnnnnnnnnnnnnnnnnnnnnnnnnnnnnnnnnnnnnnnnnnnnnnnnnnnnnnnnnnnnnnnnnnnnnnnnnnnnnnnnnnnnnnnnnnnnnnnnnnnnnnnnnnnnnnnnnnnnnnnnnnnnnnnnnnnnnnnnnnnnnnnnnnnnnnnnnnnnnnnnnnnnnnnnnnnnnnnnnnnnnnnnnnnnnnnnnnnnnnnnnnnnnnnnnnnnnnnnnnnnnnnnnnnnnnnnnnnnnnnnnnnnnnnnnnnnnnnnnnnnnnnnnnnnnnnnnnnnnnnnnnnnnnnnnnnnnnnnnnnnnnnnnnnnnnnnnnnnnnnnnnnnnnnnnnnnnnnnnnnnnnnnnnnnnnnnnnnnnnnnnnnnnnnnnnnnnnnnnnnnnnnnnnnnnnnnnnnnnnnnnnnnnnnnnnnnnnnnnnnnnnnnnnnnnnnnnnnnnnnnnnnnnnnnnnnnnnnnnnnnnnnnnnnnnnnnnnnnnnnnnnnnnnnnnnnnnnnnnnnnnnnnnnnnnnnnnnnnnnnnnnnnnnnnnnnnnnnnnnnnnnnnnnnnnnnnnnnnnnnnnnnnnnnnnnnnnnnnnnnnnnnnnnnnnnnnnnnnnnnnnnnnnnnnnnnnnnnnnnnnnnnnnnnnnnnnnnnnnnnnnnnnnnnnnnnnnnnnnnnnnnnnnnnnnnnnnnnnnnnnnnnnnnnnnnnnnnnnnnnnnnnnnnnnnnnnnnnnnnnnnnnnnnnnnnnnnnnnnnnnnnnnnnnnnnnnnnnnnnnnnnnnnnnnnnnnnnnnnnnnnnnnnnnnnnnnnnnnnnnnnnnnnnnnnnnnnnnnnnnnnnnnnnnnnnnnnnnnnnnnnnnnnnnnnnnnnnnnnnnnnnnnnnnnnnnnnnnnnnnnnnnnnnnnnnnnnnnnnnnnnnnnnnnnnnnnnnnnnnnnnnnnnnnnnnnnnnnnnnnnnnnnnnnnnnnnnnnnnnnnnnnnnnnnnnnnnnnnnnnnnnnnnnnnnnnnnnnnnnnnnnnnnnnnnnnnnnnnnnnnnnnnnnnnnnnnnnnnnnnnnnnnnnnnnnnnnnnnnnnnnnnnnnnnnnnnnnnnnnnnnnnnnnnnnnnnnnnnnnnnnnnnnnnnnnnnnnnnnnnnnnnnnnnnnnnnnnnnnnnnnnnnnnnnnnnnnnnnnnnnnnnnnnnnnnnnnnnnnnnnnnnnnnnnnnnnnnnnnnnnnnnnnnnnnnnnnnnnnnnnnnnnnnnnnnnnnnnnnnnnnnnnnnnnnnnnnnnnnnnnnnnnnnnnnnnnnnnnnnnnnnnnnnnnnnnnnnnnnnnnnnnnnnnnnnnnnnnnnnnnnnnnnnnnnnnnnnnnnnnnnnnnnnnnnnnnnnnnnnnnnnnnnnnnnnnnnnnnnnnnnnnnnnnnnnnnnnnnnnnnnnnnnnnnnnnnnnnnnnnnnnnnnnnnnnnnnnnnnnnnnnnnnnnnnnnnnnnnnnnnnnnnnnnnnnnnnnnnnnnnnnnnnnnnnnnnnnnnnnnnnnnnnnnnnnnnnnnnnnnnnnnnnnnnnnnnnnnnnnnnnnnnnnnnnnnnnnnnnnnnnnnnnnnnnnnnnnnnnnnnnnnnnnnnnnnnnnnnnnnnnnnnnnnnnnnnnnnnnnnnnnnnnnnnnnnnnnnnnnnnnnnnnnnnnnnnnnnnnnnnnnnnnnnnnnnnnnnnnnnnnnnnnnnnnnnnnnnnnnnnnnnnnnnnnnnnnnnnnnnnnnnnnnnnnnnnnnnnnnnnnnnnnnnnnnnnnnnnnnnnnnnnnnnnnnnnnnnnnnnnnnnnnnnnnnnnnnnnnnnnnnnnnnnnnnnnnnnnnnnnnnnnnnnnnnnnnnnnnnnnnnnnnnnnnnnnnnnnnnnnnnnnnnnnnnnnnnnnnnnnnnnnnnnnnnnnnnnnnnnnnnnnnnnnnnnnnnnnnnnnnnnnnnnnnnnnnnnnnnnnnnnnnnnnnnnnnnnnnnnnnnnnnnnnnnnnnnnnnnnnnnnnnnnnnnnnnnnnnnnnnnnnnnnnnnnnnnnnnnnnnnnnnnnnnnnnnnnnnnnnnnnnnnnnnnnnnnnnnnnnnnnnnnnnnnnnnnnnnnnnnnnnnnnnnnnnnnnnnnnnnnnnnnnnnnnnnnnnnnnnnnnnnnnnnnnnnnnnnnnnnnnnnnnnnnnnnnnnnnnnnnnnnnnnnnnnnnnnnnnnnnnnnnnnnnnnnnnnnnnnnnnnnnnnnnnnnnnnnnnnnnnnnnnnnnnnnnnnnnnnnnnnnnnnnnnnnnnnnnnnnnnnnnnnnnnnnnnnnnnnnnnnnnnnnnnnnnnnnnnnnnnnnnnnnnnnnnnnnnnnnnnnnnnnnnnnnnnnnnnnnnnnnnnnnnnnnnnnnnnnnnnnnnnnnnnnnnnnnnnnnnnnnnnnnnnnnnnnnnnnnnnnnnnnnnnnnnnnnnnnnnnnnnnnnnnnnnnnnnnnnnnnnnnnnnnnnnnnnnnnnnnnnnnnnnnnnnnnnnnnnnnnnnnnnnnnnnnnnnnnnnnnnnnnnnnnnnnnnnnnnnnnnnnnnnnnnnnnnnnnnnnnnnnnnnnnnnnnnnnnnnnnnnnnnnnnnnnnnnnnnnnnnnnnnnnnnnnnnnnnnnnnnnnnnnnnnnnnnnnnnnnnnnnnnnnnnnnnnnnnnnnnnnnnnnnnnnnnnnnnnnnnnnnnnnnnnnnnnnnnnnnnnnnnnnnnnnnnnnnnnnnnnnnnnnnnnnnnnnnnnnnnnnnnnnnnnnnnnnnnnnnnnnnnnnnnnnnnnnnnnnnnnnnnnnnnnnnnnnnnnnnnnnnnnnnnnnnnnnnnnnnnnnnnnnnnnnnnnnnnnnnnnnnnnnnnnnnnnnnnnnnnnnnnnnnnnnnnnnnnnnnnnnnnnnnnnnnnnnnnnnnnnnnnnnnnnnnnnnnnnnnnnnnnnnnnnnnnnnnnnnnnnnnnnnnnnnnnnnnnnnnnnnnnnnnnnnnnnnnnnnnnnnnnnnnnnnnnnnnnnnnnnnnnnnnnnnnnnnnnnnnnnnnnnnnnnnnnnnnnnnnnnnnnnnnnnnnnnnnnnnnnnnnnnnnnnnnnnnnnnnnnnnnnnnnnnnnnnnnnnnnnnnnnnnnnnnnnnnnnnnnnnnnnnnnnnnnnnnnnnnnnnnnnnnnnnnnnnnnnnnnnnnnnnnnnnnnnnnnnnnnnnnnnnnnnnnnnnnnnnnnnnnnnnnnnnnnnnnnnnnnnnnnnnnnnnnnnnnnnnnnnnnnnnnnnnnnnnnnnnnnnnnnnnnnnnnnnnnnnnnnnnnnnnnnnnnnnnnnnnnnnnnnnnnnnnnnnnnnnnnnnnnnnnnnnnnnnnnnnnnnnnnnnnnnnnnnnnnnnnnnnnnnnnnnnnnnnnnnnnnnnnnnnnnnnnnnnnnnnnnnnnnnnnnnnnnnnnnnnnnnnnnnnnnnnnnnnnnnnnnnnnnnnnnnnnnnnnnnnnnnnnnnnnnnnnnnnnnnnnnnnnnnnnnnnnnnnnnnnnnnnnnnnnnnnnnnnnnnnnnnnnnnnnnnnnnnnnnnnnnnnnnnnnnnnnnnnnnnnnnnnnnnnnnnnnnnnnnnnnnnnnnnnnnnnnnnnnnnnnnnnnnnnnnnnnnnnnnnnnnnnnnnnnnnnnnnnnnnnnnnnnnnnnnnnnnnnnnnnnnnnnnnnnnnnnnnnnnnnnnnnnnnnnnnnnnnnnnnnnnnnnnnnnnnnnnnnnnnnnnnnnnnnnnnnnnnnnnnnnnnnnnnnnnnnnnnnnnnnnnnnnnnnnnnnnnnnnnnnnnnnnnnnnnnnnnnnnnnnnnnnnnnnnnnnnnnnnnnnnnnnnnnnnnnnnnnnnnnnnnnnnnnnnnnnnnnnnnnnnnnnnnnnnnnnnnnnnnnnnnnnnnnnnnnnnnnnnnnnnnnnnnnnnnnnnnnnnnnnnnnnnnnnnnnnnnnnnnnnnnnnnnnnnnnnnnnnnnnnnnnnnnnnnnnnnnnnnnnnnnnnnnnnnnnnnnnnnnnnnnnnnnnnnnnnnnnnnnnnnnnnnnnnnnnnnnnnnnnnnnnnnnnnnnnnnnnnnnnnnnnnnnnnnnnnnnnnnnnnnnnnnnnnnnnnnnnnnnnnnnnnnnnnnnnnnnnnnnnnnnnnnnnnnnnnnnnnnnnnnnnnnnnnnnnnnnnnnnnnnnnnnnnnnnnnnnnnnnnnnnnnnnnnnnnnnnnnnnnnnnnnnnnnnnnnnnnnnnnnnnnnnnnnnnnnnnnnnnnnnnnnnnnnnnnnnnnnnnnnnnnnnnnnnnnnnnnnnnnnnnnnnnnnnnnnnnnnnnnnnnnnnnnnnnnnnnnnnnnnnnnnnnnnnnnnnnnnnnnnnnnnnnnnnnnnnnnnnnnnnnnnnnnnnnnnnnnnnnnnnnnnnnnnnnnnnnnnnnnnnnnnnnnnnnnnnnnnnnnnnnnnnnnnnnnnnnnnnnnnnnnnnnnnnnnnnnnnnnnnnnnnnnnnnnnnnnnnnnnnnnnnnnnnnnnnnnnnnnnnnnnnnnnnnnnnnnnnnnnnnnnnnnnnnnnnnnnnnnnnnnnnnnnnnnnnnnnnnnnnnnnnnnnnnnnnnnnnnnnnnnnnnnnnnnnnnnnnnnnnnnnnnnnnnnnnnnnnnnnnnnnnnnnnnnnnnnnnnnnnnnnnnnnnnnnnnnnnnnnnnnnnnnnnnnnnnnnnnnnnnnnnnnnnnnnnnnnnnnnnnnnnnnnnnnnnnnnnnnnnnnnnnnnnnnnnnnnnnnnnnnnnnnnnnnnnnnnnnnnnnnnnnnnnnnnnnnnnnnnnnnnnnnnnnnnnnnnnnnnnnnnnnnnnnnnnnnnnnnnnnnnnnnnnnnnnnnnnnnnnnnnnnnnnnnnnnnnnnnnnnnnnnnnnnnnnnnnnnnnnnnnnnnnnnnnnnnnnnnnnnnnnnnnnnnnnnnnnnnnnnnnnnnnnnnnnnnnnnnnnnnnnnnnnnnnnnnnnnnnnnnnnnnnnnnnnnnnnnnnnnnnnnnnnnnnnnnnnnnnnnnnnnnnnnnnnnnnnnnnnnnnnnnnnnnnnnnnnnnnnnnnnnnnnnnnnnnnnnnnnnnnnnnnnnnnnnnnnnnnnnnnnnnnnnnnnnnnnnnnnnnnnnnnnnnnnnnnnnnnnnnnnnnnnnnnnnnnnnnnnnnnnnnnnnnnnnnnnnnnnnnnnnnnnnnnnnnnnnnnnnnnnnnnnnnnnnnnnnnnnnnnnnnnnnnnnnnnnnnnnnnnnnnnnnnnnnnnnnnnnnnnnnnnnnnnnnnnnnnnnnnnnnnnnnnnnnnnnnnnnnnnnnnnnnnnnnnnnnnnnnnnnnnnnnnnnnnnnnnnnnnnnnnnnnnnnnnnnnnnnnnnnnnnnnnnnnnnnnnnnnnnnnnnnnnnnnnnnnnnnnnnnnnnnnnnnnnnnnnnnnnnnnnnnnnnnnnnnnnnnnnnnnnnnnnnnnnnnnnnnnnnnnnnnnnnnnnnnnnnnnnnnnnnnnnnnnnnnnnnnnnnnnnnnnnnnnnnnnnnnnnnnnnnnnnnnnnnnnnnnnnnnnnnnnnnnnnnnnnnnnnnnnnnnnnnnnnnnnnnnnnnnnnnnnnnnnnnnnnnnnnnnnnnnnnnnnnnnnnnnnnnnnnnnnnnnnnnnnnnnnnnnnnnnnnnnnnnnnnnnnnnnnnnnnnnnnnnnnnnnnnnnnnnnnnnnnnnnnnnnnnnnnnnnnnnnnnnnnnnnnnnnnnnnnnnnnnnnnnnnnnnnnnnnnnnnnnnnnnnnnnnnnnnnnnnnnnnnnnnnnnnnnnnnnnnnnnnnnnnnnnnnnnnnnnnnnnnnnnnnnnnnnnnnnnnnnnnnnnnnnnnnnnnnnnnnnnnnnnnnnnnnnnnnnnnnnnnnnnnnnnnnnnnnnnnnnnnnnnnnnnnnnnnnnnnnnnnnnnnnnnnnnnnnnnnnnnnnnnnnnnnnnnnnnnnnnnnnnnnnnnnnnnnnnnnnnnnnnnnnnnnnnnnnnnnnnnnnnnnnnnnnnnnnnnnnnnnnnnnnnnnnnnnnnnnnnnnnnnnnnnnnnnnnnnnnnnnnnnnnnnnnnnnnnnnnnnnnnnnnnnnnnnnnnnnnnnnnnnnnnnnnnnnnnnnnnnnnnnnnnnnnnnnnnnnnnnnnnnnnnnnnnnnnnnnnnnnnnnnnnnnnnnnnnnnnnnnnnnnnnnnnnnnnnnnnnnnnnnnnnnnnnnnnnnnnnnnnnnnnnnnnnnnnnnnnnnnnnnnnnnnnnnnnnnnnnnnnnnnnnnnnnnnnnnnnnnnnnnnnnnnnnnnnnnnnnnnnnnnnnnnnnnnnnnnnnnnnnnnnnnnnnnnnnnnnnnnnnnnnnnnnnnnnnnnnnnnnnnnnnnnnnnnnnnnnnnnnnnnnnnnnnnnnnnnnnnnnnnnnnnnnnnnnnnnnnnnnnnnnnnnnnnnnnnnnnnnnnnnnnnnnnnnnnnnnnnnnnnnnnnnnnnnnnnnnnnnnnnnnnnnnnnnnnnnnnnnnnnnnnnnnnnnnnnnnnnnnnnnnnnnnnnnnnnnnnnnnnnnnnnnnnnnnnnnnnnnnnnnnnnnnnnnnnnnnnnnnnnnnnnnnnnnnnnnnnnnnnnnnnnnnnnnnnnnnnnnnnnnnnnnnnnnnnnnnnnnnnnnnnnnnnnnnnnnnnnnnnnnnnnnnnnnnnnnnnnnnnnnnnnnnnnnnnnnnnnnnnnnnnnnnnnnnnnnnnnnnnnnnnnnnnnnnnnnnnnnnnnnnnnnnnnnnnnnnnnnnnnnnnnnnnnnnnnnnnnnnnnnnnnnnnnnnnnnnnnnnnnnnnnnnnnnnnnnnnnnnnnnnnnnnnnnnnnnnnnnnnnnnnnnnnnnnnnnnnnnnnnnnnnnnnnnnnnnnnnnnnnnnnnnnnnnnnnnnnnnnnnnnnnnnnnnnnnnnnnnnnnnnnnnnnnnnnnnnnnnnnnnnnnnnnnnnnnnnnnnnnnnnnnnnnnnnnnnnnnnnnnnnnnnnnnnnnnnnnnnnnnnnnnnnnnnnnnnnnnnnnnnnnnnnnnnnnnnnnnnnnnnnnnnnnnnnnnnnnnnnnnnnnnnnnnnnnnnnnnnnnnnnnnnnnnnnnnnnnnnnnnnnnnnnnnnnnnnnnnnnnnnnnnnnnnnnnnnnnnnnnnnnnnnnnnnnnnnnnnnnnnnnnnnnnnnnnnnnnnnnnnnnnnnnnnnnnnnnnnnnnnnnnnnnnnnnnnnnnnnnnnnnnnnnnnnnnnnnnnnnnnnnnnnnnnnnnnnnnnnnnnnnnnnnnnnnnnnnnnnnnnnnnnnnnnnnnnnnnnnnnnnnnnnnnnnnnnnnnnnnnnnnnnnnnnnnnnnnnnnnnnnnnnnnnnnnnnnnnnnnnnnnnnnnnnnnnnnnnnnnnnnnnnnnnnnnnnnnnnnnnnnnnnnnnnnnnnnnnnnnnnnnnnnnnnnnnnnnnnnnnnnnnnnnnnnnnnnnnnnnnnnnnnnnnnnnnnnnnnnnnnnnnnnnnnnnnnnnnnnnnnnnnnnnnnnnnnnnnnnnnnnnnnnnnnnnnnnnnnnnnnnnnnnnnnnnnnnnnnnnnnnnnnnnnnnnnnnnnnnnnnnnnnnnnnnnnnnnnnnnnnnnnnnnnnnnnnnnnnnnnnnnnnnnnnnnnnnnnnnnnnnnnnnnnnnnnnnnnnnnnnnnnnnnnnnnnnnnnnnnnnnnnnnnnnnnnnnnnnnnnnnnnnnnnnnnnnnnnnnnnnnnnnnnnnnnnnnnnnnnnnnnnnnnnnnnnnnnnnnnnnnnnnnnnnnnnnnnnnnnnnnnnnnnnnnnnnnnnnnnnnnnnnnnnnnnnnnnnnnnnnnnnnnnnnnnnnnnnnnnnnnnnnnnnnnnnnnnnnnnnnnnnnnnnnnnnnnnnnnnnnnnnnnnnnnnnnnnnnnnnnnnnnnnnnnnnnnnnnnnnnnnnnnnnnnnnnnnnnnnnnnnnnnnnnnnnnnnnnnnnnnnnnnnnnnnnnnnnnnnnnnnnnnnnnnnnnnnnnnnnnnnnnnnnnnnnnnnnnnnnnnnnnnnnnnnnnnnnnnnnnnnnnnnnnnnnnnnnnnnnnnnnnnnnnnnnnnnnnnnnnnnnnnnnnnnnnnnnnnnnnnnnnnnnnnnnnnnnnnnnnnnnnnnnnnnnnnnnnnnnnnnnnnnnnnnnnnnnnnnnnnnnnnnnnnnnnnnnnnnnnnnnnnnnnnnnnnnnnnnnnnnnnnnnnnnnnnnnnnnnnnnnnnnnnnnnnnnnnnnnnnnnnnnnnnnnnnnnnnnnnnnnnnnnnnnnnnnnnnnnnnnnnnnnnnnnnnnnnnnnnnnnnnnnnnnnnnnnnnnnnnnnnnnnnnnnnnnnnnnnnnnnnnnnnnnnnnnnnnnnnnnnnnnnnnnnnnnnnnnnnnnnnnnnnnnnnnnnnnnnnnnnnnnnnnnnnnnnnnnnnnnnnnnnnnnnnnnnnnnnnnnnnnnnnnnnnnnnnnnnnnnnnnnnnnnnnnnnnnnnnnnnnnnnnnnnnnnnnnnnnnnnnnnnnnnnnnnnnnnnnnnnnnnnnnnnnnnnnnnnnnnnnnnnnnnnnnnnnnnnnnnnnnnnnnnnnnnnnnnnnnnnnnnnnnnnnnnnnnnnnnnnnnnnnnnnnnnnnnnnnnnnnnnnnnnnnnnnnnnnnnnnnnnnnnnnnnnnnnnnnnnnnnnnnnnnnnnnnnnnnnnnnnnnnnnnnnnnnnnnnnnnnnnnnnnnnnnnnnnnnnnnnnnnnnnnnnnnnnnnnnnnnnnnnnnnnnnnnnnnnnnnnnnnnnnnnnnnnnnnnnnnnnnnnnnnnnnnnnnnnnnnnnnnnnnnnnnnnnnnnnnnnnnnnnnnnnnnnnnnnnnnnnnnnnnnnnnnnnnnnnnnnnnnnnnnnnnnnnnnnnnnnnnnnnnnnnnnnnnnnnnnnnnnnnnnnnnnnnnnnnnnnnnnnnnnnnnnnnnnnnnnnnnnnnnnnnnnnnnnnnnnnnnnnnnnnnnnnnnnnnnnnnnnnnnnnnnnnnnnnnnnnnnnnnnnnnnnnnnnnnnnnnnnnnnnnnnnnnnnnnnnnnnnnnnnnnnnnnnnnnnnnnnnnnnnnnnnnnnnnnnnnnnnnnnnnnnnnnnnnnnnnnnnnnnnnnnnnnnnnnnnnnnnnnnnnnnnnnnnnnnnnnnnnnnnnnnnnnnnnnnnnnnnnnnnnnnnnnnnnnnnnnnnnnnnnnnnnnnnnnnnnnnnnnnnnnnnnnnnnnnnnnnnnnnnnnnnnnnnnnnnnnnnnnnnnnnnnnnnnnnnnnnnnnnnnnnnnnnnnnnnnnnnnnnnnnnnnnnnnnnnnnnnnnnnnnnnnnnnnnnnnnnnnnnnnnnnnnnnnnnnnnnnnnnnnnnnnnnnnnnnnnnnnnnnnnnnnnnnnnnnnnnnnnnnnnnnnnnnnnnnnnnnnnnnnnnnnnnnnnnnnnnnnnnnnnnnnnnnnnnnnnnnnnnnnnnnnnnnnnnnnnnnnnnnnnnnnnnnnnnnnnnnnnnnnnnnnnnnnnnnnnnnnnnnnnnnnnnnnnnnnnnnnnnnnnnnnnnnnnnnnnnnnnnnnnnnnnnnnnnnnnnnnnnnnnnnnnnnnnnnnnnnnnnnnnnnnnnnnnnnnnnnnnnnnnnnnnnnnnnnnnnnnnnnnnnnnnnnnnnnnnnnnnnnnnnnnnnnnnnnnnnnnnnnnnnnnnnnnnnnnnnnnnnnnnnnnnnnnnnnnnnnnnnnnnnnnnnnnnnnnnnnnnnnnnnnnnnnnnnnnnnnnnnnnnnnnnnnnnnnnnnnnnnnnnnnnnnnnnnnnnnnnnnnnnnnnnnnnnnnnnnnnnnnnnnnnnnnnnnnnnnnnnnnnnnnnnnnnnnnnnnnnnnnnnnnnnnnnnnnnnnnnnnnnnnnnnnnnnnnnnnnnnnnnnnnnnnnnnnnnnnnnnnnnnnnnnnnnnnnnnnnnnnnnnnnnnnnnnnnnnnnnnnnnnnnnnnnnnnnnnnnnnnnnnnnnnnnnnnnnnnnnnnnnnnnnnnnnnnnnnnnnnnnnnnnnnnnnnnnnnnnnnnnnnnnnnnnnnnnnnnnnnnnnnnnnnnnnnnnnnnnnnnnnnnnnnnnnnnnnnnnnnnnnnnnnnnnnnnnnnnnnnnnnnnnnnnnnnnnnnnnnnnnnnnnnnnnnnnnnnnnnnnnnnnnnnnnnnnnnnnnnnnnnnnnnnnnnnnnnnnnnnnnnnnnnnnnnnnnnnnnnnnnnnnnnnnnnnnnnnnnnnnnnnnnnnnnnnnnnnnnnnnnnnnnnnnnnnnnnnnnnnnnnnnnnnnnnnnnnnnnnnnnnnnnnnnnnnnnnnnnnnnnnnnnnnnnnnnnnnnnnnnnnnnnnnnnnnnnnnnnnnnnnnnnnnnnnnnnnnnnnnnnnnnnnnnnnnnnnnnnnnnnnnnnnnnnnnnnnnnnnnnnnnnnnnnnnnnnnnnnnnnnnnnnnnnnnnnnnnnnnnnnnnnnnnnnnnnnnnnnnnnnnnnnnnnnnnnnnnnnnnnnnnnnnnnnnnnnnnnnnnnnnnnnnnnnnnnnnnnnnnnnnnnnnnnnnnnnnnnnnnnnnnnnnnnnnnnnnnnnnnnnnnnnnnnnnnnnnnnnnnnnnnnnnnnnnnnnnnnnnnnnnnnnnnnnnnnnnnnnnnnnnnnnnnnnnnnnnnnnnnnnnnnnnnnnnnnnnnnnnnnnnnnnnnnnnnnnnnnnnnnnnnnnnnnnnnnnnnnnnnnnnnnnnnnnnnnnnnnnnnnnnnnnnnnnnnnnnnnnnnnnnnnnnnnnnnnnnnnnnnnnnnnnnnnnnnnnnnnnnnnnnnnnnnnnnnnnnnnnnnnnnnnnnnnnnnnnnnnnnnnnnnnnnnnnnnnnnnnnnnnnnnnnnnnnnnnnnnnnnnnnnnnnnnnnnnnnnnnnnnnnnnnnnnnnnnnnnnnnnnnnnnnnnnnnnnnnnnnnnnnnnnnnnnnnnnnnnnnnnnnnnnnnnnnnnnnnnnnnnnnnnnnnnnnnnnnnnnnnnnnnnnnnnnnnnnnnnnnnnnnnnnnnnnnnnnnnnnnnnnnnnnnnnnnnnnnnnnnnnnnnnnnnnnnnnnnnnnnnnnnnnnnnnnnnnnnnnnnnnnnnnnnnnnnnnnnnnnnnnnnnnnnnnnnnnnnnnnnnnnnnnnnnnnnnnnnnnnnnnnnnnnnnnnnnnnnnnnnnnnnnnnnnnnnnnnnnnnnnnnnnnnnnnnnnnnnnnnnnnnnnnnnnnnnnnnnnnnnnnnnnnnnnnnnnnnnnnnnnnnnnnnnnnnnnnnnnnnnnnnnnnnnnnnnnnnnnnnnnnnnnnnnnnnnnnnnnnnnnnnnnnnnnnnnnnnnnnnnnnnnnnnnnnnnnnnnnnnnnnnnnnnnnnnnnnnnnnnnnnnnnnnnnnnnnnnnnnnnnnnnnnnnnnnnnnnnnnnnnnnnnnnnnnnnnnnnnnnnnnnnnnnnnnnnnnnnnnnnnnnnnnnnnnnnnnnnnnnnnnnnnnnnnnnnnnnnnnnnnnnnnnnnnnnnnnnnnnnnnnnnnnnnnnnnnnnnnnnnnnnnnnnnnnnnnnnnnnnnnnnnnnnnnnnnnnnnnnnnnnnnnnnnnnnnnnnnnnnnnnnnnnnnnnnnnnnnnnnnnnnnnnnnnnnnnnnnnnnnnnnnnnnnnnnnnnnnnnnnnnnnnnnnnnnnnnnnnnnnnnnnnnnnnnnnnnnnnnnnnnnnnnnnnnnnnnnnnnnnnnnnnnnnnnnnnnnnnnnnnnnnnnnnnnnnnnnnnnnnnnnnnnnnnnnnnnnnnnnnnnnnnnnnnnnnnnnnnnnnnnnnnnnnnnnnnnnnnnnnnnnnnnnnnnnnnnnnnnnnnnnnnnnnnnnnnnnnnnnnnnnnnnnnnnnnnnnnnnnnnnnnnnnnnnnnnnnnnnnnnnnnnnnnnnnnnnnnnnnnnnnnnnnnnnnnnnnnnnnnnnnnnnnnnnnnnnnnnnnnnnnnnnnnnnnnnnnnnnnnnnnnnnnnnnnnnnnnnnnnnnnnnnnnnnnnnnnnnnnnnnnnnnnnnnnnnnnnnnnnnnnnnnnnnnnnnnnnnnnnnnnnnnnnnnnnnnnnnnnnnnnnnnnnnnnnnnnnnnnnnnnnnnnnnnnnnnnnnnnnnnnnnnnnnnnnnnnnnnnnnnnnnnnnnnnnnnnnnnnnnnnnnnnnnnnnnnnnnnnnnnnnnnnnnnnnnnnnnnnnnnnnnnnnnnnnnnnnnnnnnnnnnnnnnnnnnnnnnnnnnnnnnnnnnnnnnnnnnnnnnnnnnnnnnnnnnnnnnnnnnnnnnnnnnnnnnnnnnnnnnnnnnnnnnnnnnnnnnnnnnnnnnnnnnnnnnnnnnnnnnnnnnnnnnnnnnnnnnnnnnnnnnnnnnnnnnnnnnnnnnnnnnnnnnnnnnnnnnnnnnnnnnnnnnnnnnnnnnnnnnnnnnnnnnnnnnnnnnnnnnnnnnnnnnnnnnnnnnnnnnnnnnnnnnnnnnnnnnnnnnnnnnnnnnnnnnnnnnnnnnnnnnnnnnnnnnnnnnnnnnnnnnnnnnnnnnnnnnnnnnnnnnnnnnnnnnnnnnnnnnnnnnnnnnnnnnnnnnnnnnnnnnnnnnnnnnnnnnnnnnnnnnnnnnnnnnnnnnnnnnnnnnnnnnnnnnnnnnnnnnnnnnnnnnnnnnnnnnnnnnnnnnnnnnnnnnnnnnnnnnnnnnnnnnnnnnnnnnnnnnnnnnnnnnnnnnnnnnnnnnnnnnnnnnnnnnnnnnnnnnnnnnnnnnnnnnnnnnnnnnnnnnnnnnnnnnnnnnnnnnnnnnnnnnnnnnnnnnnnnnnnnnnnnnnnnnnnnnnnnnnnnnnnnnnnnnnnnnnnnnnnnnnnnnnnnnnnnnnnnnnnnnnnnnnnnnnnnnnnnnnnnnnnnnnnnnnnnnnnnnnnnnnnnnnnnnnnnnnnnnnnnnnnnnnnnnnnnnnnnnnnnnnnnnnnnnnnnnnnnnnnnnnnnnnnnnnnnnnnnnnnnnnnnnnnnnnnnnnnnnnnnnnnnnnnnnnnnnnnnnnnnnnnnnnnnnnnnnnnnnnnnnnnnnnnnnnnnnnnnnnnnnnnnnnnnnnnnnnnnnnnnnnnnnnnnnnnnnnnnnnnnnnnnnnnnnnnnnnnnnnnnnnnnnnnnnnnnnnnnnnnnnnnnnnnnnnnnnnnnnnnnnnnnnnnnnnnnnnnnnnnnnnnnnnnnnnnnnnnnnnnnnnnnnnnnnnnnnnnnnnnnnnnnnnnnnnnnnnnnnnnnnnnnnnnnnnnnnnnnnnnnnnnnnnnnnnnnnnnnnnnnnnnnnnnnnnnnnnnnnnnnnnnnnnnnnnnnnnnnnnnnnnnnnnnnnnnnnnnnnnnnnnnnnnnnnnnnnnnnnnnnnnnnnnnnnnnnnnnnnnnnnnnnnnnnnnnnnnnnnnnnnnnnnnnnnnnnnnnnnnnnnnnnnnnnnnnnnnnnnnnnnnnnnnnnnnnnnnnnnnnnnnnnnnnnnnnnnnnnnnnnnnnnnnnnnnnnnnnnnnnnnnnnnnnnnnnnnnnnnnnnnnnnnnnnnnnnnnnnnnnnnnnnnnnnnnnnnnnnnnnnnnnnnnnnnnnnnnnnnnnnnnnnnnnnnnnnnnnnnnnnnnnnnnnnnnnnnnnnnnnnnnnnnnnnnnnnnnnnnnnnnnnnnnnnnnnnnnnnnnnnnnnnnnnnnnnnnnnnnnnnnnnnnnnnnnnnnnnnnnnnnnnnnnnnnnnnnnnnnnnnnnnnnnnnnnnnnnnnnnnnnnnnnnnnnnnnnnnnnnnnnnnnnnnnnnnnnnnnnnnnnnnnnnnnnnnnnnnnnnnnnnnnnnnnnnnnnnnnnnnnnnnnnnnnnnnnnnnnnnnnnnnnnnnnnnnnnnnnnnnnnnnnnnnnnnnnnnnnnnnnnnnnnnnnnnnnnnnnnnnnnnnnnnnnnnnnnnnnnnnnnnnnnnnnnnnnnnnnnnnnnnnnnnnnnnnnnnnnnnnnnnnnnnnnnnnnnnnnnnnnnnnnnnnnnnnnnnnnnnnnnnnnnnnnnnnnnnnnnnnnnnnnnnnnnnnnnnnnnnnnnnnnnnnnnnnnnnnnnnnnnnnnnnnnnnnnnnnnnnnnnnnnnnnnnnnnnnnnnnnnnnnnnnnnnnnnnnnnnnnnnnnnnnnnnnnnnnnnnnnnnnnnnnnnnnnnnnnnnnnnnnnnnnnnnnnnnnnnnnnnnnnnnnnnnnnnnnnnnnnnnnnnnnnnnnnnnnnnnnnnnnnnnnnnnnnnnnnnnnnnnnnnnnnnnnnnnnnnnnnnnnnnnnnnnnnnnnnnnnnnnnnnnnnnnnnnnnnnnnnnnnnnnnnnnnnnnnnnnnnnnnnnnnnnnnnnnnnnnnnnnnnnnnnnnnnnnnnnnnnnnnnnnnnnnnnnnnnnnnnnnnnnnnnnnnnnnnnnnnnnnnnnnnnnnnnnnnnnnnnnnnnnnnnnnnnnnnnnnnnnnnnnnnnnnnnnnnnnnnnnnnnnnnnnnnnnnnnnnnnnnnnnnnnnnnnnnnnnnnnnnnnnnnnnnnnnnnnnnnnnnnnnnnnnnnnnnnnnnnnnnnnnnnnnnnnnnnnnnnnnnnnnnnnnnnnnnnnnnnnnnnnnnnnnnnnnnnnnnnnnnnnnnnnnnnnnnnnnnnnnnnnnnnnnnnnnnnnnnnnnnnnnnnnnnnnnnnnnnnnnnnnnnnnnnnnnnnnnnnnnnnnnnnnnnnnnnnnnnnnnnnnnnnnnnnnnnnnnnnnnnnnnnnnnnnnnnnnnnnnnnnnnnnnnnnnnnnnnnnnnnnnnnnnnnnnnnnnnnnnnnnnnnnnnnnnnnnnnnnnnnnnnnnnnnnnnnnnnnnnnnnnnnnnnnnnnnnnnnnnnnnnnnnnnnnnnnnnnnnnnnnnnnnnnnnnnnnnnnnnnnnnnnnnnnnnnnnnnnnnnnnnnnnnnnnnnnnnnnnnnnnnnnnnnnnnnnnnnnnnnnnnnnnnnnnnnnnnnnnnnnnnnnnnnnnnnnnnnnnnnnnnnnnnnnnnnnnnnnnnnnnnnnnnnnnnnnnnnnnnnnnnnnnnnnnnnnnnnnnnnnnnnnnnnnnnnnnnnnnnnnnnnnnnnnnnnnnnnnnnnnnnnnnnnnnnnnnnnnnnnnnnnnnnnnnnnnnnnnnnnnnnnnnnnnnnnnnnnnnnnnnnnnnnnnnnnnnnnnnnnnnnnnnnnnnnnnnnnnnnnnnnnnnnnnnnnnnnnnnnnnnnnnnnnnnnnnnnnnnnnnnnnnnnnnnnnnnnnnnnnnnnnnnnnnnnnnnnnnnnnnnnnnnnnnnnnnnnnnnnnnnnnnnnnnnnnnnnnnnnnnnnnnnnnnnnnnnnnnnnnnnnnnnnnnnnnnnnnnnnnnnnnnnnnnnnnnnnnnnnnnnnnnnnnnnnnnnnnnnnnnnnnnnnnnnnnnnnnnnnnnnnnnnnnnnnnnnnnnnnnnnnnnnnnnnnnnnnnnnnnnnnnnnnnnnnnnnnnnnnnnnnnnnnnnnnnnnnnnnnnnnnnnnnnnnnnnnnnnnnnnnnnnnnnnnnnnnnnnnnnnnnnnnnnnnnnnnnnnnnnnnnnnnnnnnnnnnnnnnnnnnnnnnnnnnnnnnnnnnnnnnnnnnnnnnnnnnnnnnnnnnnnnnnnnnnnnnnnnnnnnnnnnnnnnnnnnnnnnnnnnnnnnnnnnnnnnnnnnnnnnnnnnnnnnnnnnnnnnnnnnnnnnnnnnnnnnnnnnnnnnnnnnnnnnnnnnnnnnnnnnnnnnnnnnnnnnnnnnnnnnnnnnnnnnnnnnnnnnnnnnnnnnnnnnnnnnnnnnnnnnnnnnnnnnnnnnnnnnnnnnnnnnnnnnnnnnnnnnnnnnnnnnnnnnnnnnnnnnnnnnnnnnnnnnnnnnnnnnnnnnnnnnnnnnnnnnnnnnnnnnnnnnnnnnnnnnnnnnnnnnnnnnnnnnnnnnnnnnnnnnnnnnnnnnnnnnnnnnnnnnnnnnnnnnnnnnnnnnnnnnnnnnnnnnnnnnnnnnnnnnnnnnnnnnnnnnnnnnnnnnnnnnnnnnnnnnnnnnnnnnnnnnnnnnnnnnnnnnnnnnnnnnnnnnnnnnnnnnnnnnnnnnnnnnnnnnnnnnnnnnnnnnnnnnnnnnnnnnnnnnnnnnnnnnnnnnnnnnnnnnnnnnnnnnnnnnnnnnnnnnnnnnnnnnnnnnnnnnnnnnnnnnnnnnnnnnnnnnnnnnnnnnnnnnnnnnnnnnnnnnnnnnnnnnnnnnnnnnnnnnnnnnnnnnnnnnnnnnnnnnnnnnnnnnnnnnnnnnnnnnnnnnnnnnnnnnnnnnnnnnnnnnnnnnnnnnnnnnnnnnnnnnnnnnnnnnnnnnnnnnnnnnnnnnnnnnnnnnnnnnnnnnnnnnnnnnnnnnnnnnnnnnnnnnnnnnnnnnnnnnnnnnnnnnnnnnnnnnnnnnnnnnnnnnnnnnnnnnnnnnnnnnnnnnnnnnnnnnnnnnnnnnnnnnnnnnnnnnnnnnnnnnnnnnnnnnnnnnnnnnnnnnnnnnnnnnnnnnnnnnnnnnnnnnnnnnnnnnnnnnnnnnnnnnnnnnnnnnnnnnnnnnnnnnnnnnnnnnnnnnnnnnnnnnnnnnnnnnnnnnnnnnnnnnnnnnnnnnnnnnnnnnnnnnnnnnnnnnnnnnnnnnnnnnnnnnnnnnnnnnnnnnnnnnnnnnnnnnnnnnnnnnnnnnnnnnnnnnnnnnnnnnnnnnnnnnnnnnnnnnnnnnnnnnnnnnnnnnnnnnnnnnnnnnnnnnnnnnnnnnnnnnnnnnnnnnnnnnnnnnnnnnnnnnnnnnnnnnnnnnnnnnnnnnnnnnnnnnnnnnnnnnnnnnnnnnnnnnnnnnnnnnnnnnnnnnnnnnnnnnnnnnnnnnnnnnnnnnnnnnnnnnnnnnnnnnnnnnnnnnnnnnnnnnnnnnnnnnnnnnnnnnnnnnnnnnnnnnnnnnnnnnnnnnnnnnnnnnnnnnnnnnnnnnnnnnnnnnnnnnnnnnnnnnnnnnnnnnnnnnnnnnnnnnnnnnnnnnnnnnnnnnnnnnnnnnnnnnnnnnnnnnnnnnnnnnnnnnnnnnnnnnnnnnnnnnnnnnnnnnnnnnnnnnnnnnnnnnnnnnnnnnnnnnnnnnnnnnnnnnnnnnnnnnnnnnnnnnnnnnnnnnnnnnnnnnnnnnnnnnnnnnnnnnnnnnnnnnnnnnnnnnnnnnnnnnnnnnnnnnnnnnnnnnnnnnnnnnnnnnnnnnnnnnnnnnnnnnnnnnnnnnnnnnnnnnnnnnnnnnnnnnnnnnnnnnnnnnnnnnnnnnnnnnnnnnnnnnnnnnnnnnnnnnnnnnnnnnnnnnnnnnnnnnnnnnnnnnnnnnnnnnnnnnnnnnnnnnnnnnnnnnnnnnnnnnnnnnnnnnnnnnnnnnnnnnnnnnnnnnnnnnnnnnnnnnnnnnnnnnnnnnnnnnnnnnnnnnnnnnnnnnnnnnnnnnnnnnnnnnnnnnnnnnnnnnnnnnnnnnnnnnnnnnnnnnnnnnnnnnnnnnnnnnnnnnnnnnnnnnnnnnnnnnnnnnnnnnnnnnnnnnnnnnnnnnnnnnnnnnnnnnnnnnnnnnnnnnnnnnnnnnnnnnnnnnnnnnnnnnnnnnnnnnnnnnnnnnnnnnnnnnnnnnnnnnnnnnnnnnnnnnnnnnnnnnnnnnnnnnnnnnnnnnnnnnnnnnnnnnnnnnnnnnnnnnnnnnnnnnnnnnnnnnnnnnnnnnnnnnnnnnnnnnnnnnnnnnnnnnnnnnnnnnnnnnnnnnnnnnnnnnnnnnnnnnnnnnnnnnnnnnnnnnnnnnnnnnnnnnnnnnnnnnnnnnnnnnnnnnnnnnnnnnnnnnnnnnnnnnnnnnnnnnnnnnnnnnnnnnnnnnnnnnnnnnnnnnnnnnnnnnnnnnnnnnnnnnnnnnnnnnnnnnnnnnnnnnnnnnnnnnnnnnnnnnnnnnnnnnnnnnnnnnnnnnnnnnnnnnnnnnnnnnnnnnnnnnnnnnnnnnnnnnnnnnnnnnnnnnnnnnnnnnnnnnnnnnnnnnnnnnnnnnnnnnnnnnnnnnnnnnnnnnnnnnnnnnnnnnnnnnnnnnnnnnnnnnnnnnnnnnnnnnnnnnnnnnnnnnnnnnnnnnnnnnnnnnnnnnnnnnnnnnnnnnnnnnnnnnnnnnnnnnnnnnnnnnnnnnnnnnnnnnnnnnnnnnnnnnnnnnnnnnnnnnnnnnnnnnnnnnnnnnnnnnnnnnnnnnnnnnnnnnnnnnnnnnnnnnnnnnnnnnnnnnnnnnnnnnnnnnnnnnnnnnnnnnnnnnnnnnnnnnnnnnnnnnnnnnnnnnnnnnnnnnnnnnnnnnnnnnnnnnnnnnnnnnnnnnnnnnnnnnnnnnnnnnnnnnnnnnnnnnnnnnnnnnnnnnnnnnnnnnnnnnnnnnnnnnnnnnnnnnnnnnnnnnnnnnnnnnnnnnnnnnnnnnnnnnnnnnnnnnnnnnnnnnnnnnnnnnnnnnnnnnnnnnnnnnnnnnnnnnnnnnnnnnnnnnnnnnnnnnnnnnnnnnnnnnnnnnnnnnnnnnnnnnnnnnnnnnnnnnnnnnnnnnnnnnnnnnnnnnnnnnnnnnnnnnnnnnnnnnnnnnnnnnnnnnnnnnnnnnnnnnnnnnnnnnnnnnnnnnnnnnnnnnnnnnnnnnnnnnnnnnnnnnnnnnnnnnnnnnnnnnnnnnnnnnnnnnnnnnnnnnnnnnnnnnnnnnnnnnnnnnnnnnnnnnnnnnnnnnnnnnnnnnnnnnnnnnnnnnnnnnnnnnnnnnnnnnnnnnnnnnnnnnnnnnnnnnnnnnnnnnnnnnnnnnnnnnnnnnnnnnnnnnnnnnnnnnnnnnnnnnnnnnnnnnnnnnnnnnnnnnnnnnnnnnnnnnnnnnnnnnnnnnnnnnnnnnnnnnnnnnnnnnnnnnnnnnnnnnnnnnnnnnnnnnnnnnnnnnnnnnnnnnnnnnnnnnnnnnnnnnnnnnnnnnnnnnnnnnnnnnnnnnnnnnnnnnnnnnnnnnnnnnnnnnnnnnnnnnnnnnnnnnnnnnnnnnnnnnnnnnnnnnnnnnnnnnnnnnnnnnnnnnnnnnnnnnnnnnnnnnnnnnnnnnnnnnnnnnnnnnnnnnnnnnnnnnnnnnnnnnnnnnnnnnnnnnnnnnnnnnnnnnnnnnnnnnnnnnnnnnnnnnnnnnnnnnnnnnnnnnnnnnnnnnnnnnnnnnnnnnnnnnnnnnnnnnnnnnnnnnnnnnnnnnnnnnnnnnnnnnnnnnnnnnnnnnnnnnnnnnnnnnnnnnnnnnnnnnnnnnnnnnnnnnnnnnnnnnnnnnnnnnnnnnnnnnnnnnnnnnnnnnnnnnnnnnnnnnnnnnnnnnnnnnnnnnnnnnnnnnnnnnnnnnnnnnnnnnnnnnnnnnnnnnnnnnnnnnnnnnnnnnnnnnnnnnnnnnnnnnnnnnnnnnnnnnnnnnnnnnnnnnnnnnnnnnnnnnnnnnnnnnnnnnnnnnnnnnnnnnnnnnnnnnnnnnnnnnnnnnnnnnnnnnnnnnnnnnnnnnnnnnnnnnnnnnnnnnnnnnnnnnnnnnnnnnnnnnnnnnnnnnnnnnnnnnnnnnnnnnnnnnnnnnnnnnnnnnnnnnnnnnnnnnnnnnnnnnnnnnnnnnnnnnnnnnnnnnnnnnnnnnnnnnnnnnnnnnnnnnnnnnnnnnnnnnnnnnnnnnnnnnnnnnnnnnnnnnnnnnnnnnnnnnnnnnnnnnnnnnnnnnnnnnnnnnnnnnnnnnnnnnnnnnnnnnnnnnnnnnnnnnnnnnnnnnnnnnnnnnnnnnnnnnnnnnnnnnnnnnnnnnnnnnnnnnnnnnnnnnnnnnnnnnnnnnnnnnnnnnnnnnnnnnnnnnnnnnnnnnnnnnnnnnnnnnnnnnnnnnnnnnnnnnnnnnnnnnnnnnnnnnnnnnnnnnnnnnnnnnnnnnnnnnnnnnnnnnnnnnnnnnnnnnnnnnnnnnnnnnnnnnnnnnnnnnnnnnnnnnnnnnnnnnnnnnnnnnnnnnnnnnnnnnnnnnnnnnnnnnnnnnnnnnnnnnnnnnnnnnnnnnnnnnnnnnnnnnnnnnnnnnnnnnnnnnnnnnnnnnnnnnnnnnnnnnnnnnnnnnnnnnnnnnnnnnnnnnnnnnnnnnnnnnnnnnnnnnnnnnnnnnnnnnnnnnnnnnnnnnnnnnnnnnnnnnnnnnnnnnnnnnnnnnnnnnnnnnnnnnnnnnnnnnnnnnnnnnnnnnnnnnnnnnnnnnnnnnnnnnnnnnnnnnnnnnnnnnnnnnnnnnnnnnnnnnnnnnnnnnnnnnnnnnnnnnnnnnnnnnnnnnnnnnnnnnnnnnnnnnnnnnnnnnnnnnnnnnnnnnnnnnnnnnnnnnnnnnnnnnnnnnnnnnnnnnnnnnnnnnnnnnnnnnnnnnnnnnnnnnnnnnnnnnnnnnnnnnnnnnnnnnnnnnnnnnnnnnnnnnnnnnnnnnnnnnnnnnnnnnnnnnnnnnnnnnnnnnnnnnnnnnnnnnnnnnnnnnnnnnnnnnnnnnnnnnnnnnnnnnnnnnnnnnnnnnnnnnnnnnnnnnnnnnnnnnnnnnnnnnnnnnnnnnnnnnnnnnnnnnnnnnnnnnnnnnnnnnnnnnnnnnnnnnnnnnnnnnnnnnnnnnnnnnnnnnnnnnnnnnnnnnnnnnnnnnnnnnnnnnnnnnnnnnnnnnnnnnnnnnnnnnnnnnnnnnnnnnnnnnnnnnnnnnnnnnnnnnnnnnnnnnnnnnnnnnnnnnnnnnnnnnnnnnnnnnnnnnnnnnnnnnnnnnnnnnnnnnnnnnnnnnnnnnnnnnnnnnnnnnnnnnnnnnnnnnnnnnnnnnnnnnnnnnnnnnnnnnnnnnnnnnnnnnnnnnnnnnnnnnnnnnnnnnnnnnnnnnnnnnnnnnnnnnnnnnnnnnnnnnnnnnnnnnnnnnnnnnnnnnnnnnnnnnnnnnnnnnnnnnnnnnnnnnnnnnnnnnnnnnnnnnnnnnnnnnnnnnnnnnnnnnnnnnnnnnnnnnnnnnnnnnnnnnnnnnnnnnnnnnnnnnnnnnnnnnnnnnnnnnnnnnnnnnnnnnnnnnnnnnnnnnnnnnnnnnnnnnnnnnnnnnnnnnnnnnnnnnnnnnnnnnnnnnnnnnnnnnnnnnnnnnnnnnnnnnnnnnnnnnnnnnnnnnnnnnnnnnnnnnnnnnnnnnnnnnnnnnnnnnnnnnnnnnnnnnnnnnnnnnnnnnnnnnnnnnnnnnnnnnnnnnnnnnnnnnnnnnnnnnnnnnnnnnnnnnnnnnnnnnnnnnnnnnnnnnnnnnnnnnnnnnnnnnnnnnnnnnnnnnnnnnnnnnnnnnnnnnnnnnnnnnnnnnnnnnnnnnnnnnnnnnnnnnnnnnnnnnnnnnnnnnnnnnnnnnnnnnnnnnnnnnnnnnnnnnnnnnnnnnnnnnnnnnnnnnnnnnnnnnnnnnnnnnnnnnnnnnnnnnnnnnnnnnnnnnnnnnnnnnnnnnnnnnnnnnnnnnnnnnnnnnnnnnnnnnnnnnnnnnnnnnnnnnnnnnnnnnnnnnnnnnnnnnnnnnnnnnnnnnnnnnnnnnnnnnnnnnnnnnnnnnnnnnnnnnnnnnnnnnnnnnnnnnnnnnnnnnnnnnnnnnnnnnnnnnnnnnnnnnnnnnnnnnnnnnnnnnnnnnnnnnnnnnnnnnnnnnnnnnnnnnnnnnnnnnnnnnnnnnnnnnnnnnnnnnnnnnnnnnnnnnnnnnnnnnnnnnnnnnnnnnnnnnnnnnnnnnnnnnnnnnnnnnnnnnnnnnnnnnnnnnnnnnnnnnnnnnnnnnnnnnnnnnnnnnnnnnnnnnnnnnnnnnnnnnnnnnnnnnnnnnnnnnnnnnnnnnnnnnnnnnnnnnnnnnnnnnnnnnnnnnnnnnnnnnnnnnnnnnnnnnnnnnnnnnnnnnnnnnnnnnnnnnnnnnnnnnnnnnnnnnnnnnnnnnnnnnnnnnnnnnnnnnnnnnnnnnnnnnnnnnnnnnnnnnnnnnnnnnnnnnnnnnnnnnnnnnnnnnnnnnnnnnnnnnnnnnnnnnnnnnnnnnnnnnnnnnnnnnnnnnnnnnnnnnnnnnnnnnnnnnnnnnnnnnnnnnnnnnnnnnnnnnnnnnnnnnnnnnnnnnnnnnnnnnnnnnnnnnnnnnnnnnnnnnnnnnnnnnnnnnnnnnnnnnnnnnnnnnnnnnnnnnnnnnnnnnnnnnnnnnnnnnnnnnnnnnnnnnnnnnnnnnnnnnnnnnnnnnnnnnnnnnnnnnnnnnnnnnnnnnnnnnnnnnnnnnnnnnnnnnnnnnnnnnnnnnnnnnnnnnnnnnnnnnnnnnnnnnnnnnnnnnnnnnnnnnnnnnnnnnnnnnnnnnnnnnnnnnnnnnnnnnnnnnnnnnnnnnnnnnnnnnnnnnnnnnnnnnnnnnnnnnnnnnnnnnnnnnnnnnnnnnnnnnnnnnnnnnnnnnnnnnnnnnnnnnnnnnnnnnnnnnnnnnnnnnnnnnnnnnnnnnnnnnnnnnnnnnnnnnnnnnnnnnnnnnnnnnnnnnnnnnnnnnnnnnnnnnnnnnnnnnnnnnnnnnnnnnnnnnnnnnnnnnnnnnnnnnnnnnnnnnnnnnnnnnnnnnnnnnnnnnnnnnnnnnnnnnnnnnnnnnnnnnnnnnnnnnnnnnnnnnnnnnnnnnnnnnnnnnnnnnnnnnnnnnnnnnnnnnnnnnnnnnnnnnnnnnnnnnnnnnnnnnnnnnnnnnnnnnnnnnnnnnnnnnnnnnnnnnnnnnnnnnnnnnnnnnnnnnnnnnnnnnnnnnnnnnnnnnnnnnnnnnnnnnnnnnnnnnnnnnnnnnnnnnnnnnnnnnnnnnnnnnnnnnnnnnnnnnnnnnnnnnnnnnnnnnnnnnnnnnnnnnnnnnnnnnnnnnnnnnnnnnnnnnnnnnnnnnnnnnnnnnnnnnnnnnnnnnnnnnnnnnnnnnnnnnnnnnnnnnnnnnnnnnnnnnnnnnnnnnnnnnnnnnnnnnnnnnnnnnnnnnnnnnnnnnnnnnnnnnnnnnnnnnnnnnnnnnnnnnnnnnnnnnnnnnnnnnnnnnnnnnnnnnnnnnnnnnnnnnnnnnnnnnnnnnnnnnnnnnnnnnnnnnnnnnnnnnnnnnnnnnnnnnnnnnnnnnnnnnnnnnnnnnnnnnnnnnnnnnnnnnnnnnnnnnnnnnnnnnnnnnnnnnnnnnnnnnnnnnnnnnnnnnnnnnnnnnnnnnnnnnnnnnnnnnnnnnnnnnnnnnnnnnnnnnnnnnnnnnnnnnnnnnnnnnnnnnnnnnnnnnnnnnnnnnnnnnnnnnnnnnnnnnnnnnnnnnnnnnnnnnnnnnnnnnnnnnnnnnnnnnnnnnnnnnnnnnnnnnnnnnnnnnnnnnnnnnnnnnnnnnnnnnnnnnnnnnnnnnnnnnnnnnnnnnnnnnnnnnnnnnnnnnnnnnnnnnnnnnnnnnnnnnnnnnnnnnnnnnnnnnnnnnnnnnnnnnnnnnnnnnnnnnnnnnnnnnnnnnnnnnnnnnnnnnnnnnnnnnnnnnnnnnnnnnnnnnnnnnnnnnnnnnnnnnnnnnnnnnnnnnnnnnnnnnnnnnnnnnnnnnnnnnnnnnnnnnnnnnnnnnnnnnnnnnnnnnnnnnnnnnnnnnnnnnnnnnnnnnnnnnnnnnnnnnnnnnnnnnnnnnnnnnnnnnnnnnnnnnnnnnnnnnnnnnnnnnnnnnnnnnnnnnnnnnnnnnnnnnnnnnnnnnnnnnnnnnnnnnnnnnnnnnnnnnnnnnnnnnnnnnnnnnnnnnnnnnnnnnnnnnnnnnnnnnnnnnnnnnnnnnnnnnnnnnnnnnnnnnnnnnnnnnnnnnnnnnnnnnnnnnnnnnnnnnnnnnnnnnnnnnnnnnnnnnnnnnnnnnnnnnnnnnnnnnnnnnnnnnnnnnnnnnnnnnnnnnnnnnnnnnnnnnnnnnnnnnnnnnnnnnnnnnnnnnnnnnnnnnnnnnnnnnnnnnnnnnnnnnnnnnnnnnnnnnnnnnnnnnnnnnnnnnnnnnnnnnnnnnnnnnnnnnnnnnnnnnnnnnnnnnnnnnnnnnnnnnnnnnnnnnnnnnnnnnnnnnnnnnnnnnnnnnnnnnnnnnnnnnnnnnnnnnnnnnnnnnnnnnnnnnnnnnnnnnnnnnnnnnnnnnnnnnnnnnnnnnnnnnnnnnnnnnnnnnnnnnnnnnnnnnnnnnnnnnnnnnnnnnnnnnnnnnnnnnnnnnnnnnnnnnnnnnnnnnnnnnnnnnnnnnnnnnnnnnnnnnnnnnnnnnnnnnnnnnnnnnnnnnnnnnnnnnnnnnnnnnnnnnnnnnnnnnnnnnnnnnnnnnnnnnnnnnnnnnnnnnnnnnnnnnnnnnnnnnnnnnnnnnnnnnnnnnnnnnnnnnnnnnnnnnnnnnnnnnnnnnnnnnnnnnnnnnnnnnnnnnnnnnnnnnnnnnnnnnnnnnnnnnnnnnnnnnnnnnnnnnnnnnnnnnnnnnnnnnnnnnnnnnnnnnnnnnnnnnnnnnnnnnnnnnnnnnnnnnnnnnnnnnnnnnnnnnnnnnnnnnnnnnnnnnnnnnnnnnnnnnnnnnnnnnnnnnnnnnnnnnnnnnnnnnnnnnnnnnnnnnnnnnnnnnnnnnnnnnnnnnnnnnnnnnnnnnnnnnnnnnnnnnnnnnnnnnnnnnnnnnnnnnnnnnnnnnnnnnnnnnnnnnnnnnnnnnnnnnnnnnnnnnnnnnnnnnnnnnnnnnnnnnnnnnnnnnnnnnnnnnnnnnnnnnnnnnnnnnnnnnnnnnnnnnnnnnnnnnnnnnnnnnnnnnnnnnnnnnnnnnnnnnnnnnnnnnnnnnnnnnnnnnnnnnnnnnnnnnnnnnnnnnnnnnnnnnnnnnnnnnnnnnnnnnnnnnnnnnnnnnnnnnnnnnnnnnnnnnnnnnnnnnnnnnnnnnnnnnnnnnnnnnnnnnnnnnnnnnnnnnnnnnnnnnnnnnnnnnnnnnnnnnnnnnnnnnnnnnnnnnnnnnnnnnnnnnnnnnnnnnnnnnnnnnnnnnnnnnnnnnnnnnnnnnnnnnnnnnnnnnnnnnnnnnnnnnnnnnnnnnnnnnnnnnnnnnnnnnnnnnnnnnnnnnnnnnnnnnnnnnnnnnnnnnnnnnnnnnnnnnnnnnnnnnnnnnnnnnnnnnnnnnnnnnnnnnnnnnnnnnnnnnnnnnnnnnnnnnnnnnnnnnnnnnnnnnnnnnnnnnnnnnnnnnnnnnnnnnnnnnnnnnnnnnnnnnnnnnnnnnnnnnnnnnnnnnnnnnnnnnnnnnnnnnnnnnnnnnnnnnnnnnnnnnnnnnnnnnnnnnnnnnnnnnnnnnnnnnnnnnnnnnnnnnnnnnnnnnnnnnnnnnnnnnnnnnnnnnnnnnnnnnnnnnnnnnnnnnnnnnnnnnnnnnnnnnnnnnnnnnnnnnnnnnnnnnnnnnnnnnnnnnnnnnnnnnnnnnnnnnnnnnnnnnnnnnnnnnnnnnnnnnnnnnnnnnnnnnnnnnnnnnnnnnnnnnnnnnnnnnnnnnnnnnnnnnnnnnnnnnnnnnnnnnnnnnnnnnnnnnnnnnnnnnnnnnnnnnnnnnnnnnnnnnnnnnnnnnnnnnnnnnnnnnnnnnnnnnnnnnnnnnnnnnnnnnnnnnnnnnnnnnnnnnnnnnnnnnnnnnnnnnnnnnnnnnnnnnnnnnnnnnnnnnnnnnnnnnnnnnnnnnnnnnnnnnnnnnnnnnnnnnnnnnnnnnnnnnnnnnnnnnnnnnnnnnnnnnnnnnnnnnnnnnnnnnnnnnnnnnnnnnnnnnnnnnnnnnnnnnnnnnnnnnnnnnnnnnnnnnnnnnnnnnnnnnnnnnnnnnnnnnnnnnnnnnnnnnnnnnnnnnnnnnnnnnnnnnnnnnnnnnnnnnnnnnnnnnnnnnnnnnnnnnnnnnnnnnnnnnnnnnnnnnnnnnnnnnnnnnnnnnnnnnnnnnnnnnnnnnnnnnnnnnnnnnnnnnnnnnnnnnnnnnnnnnnnnnnnnnnnnnnnnnnnnnnnnnnnnnnnnnnnnnnnnnnnnnnnnnnnnnnnnnnnnnnnnnnnnnnnnnnnnnnnnnnnnnnnnnnnnnnnnnnnnnnnnnnnnnnnnnnnnnnnnnnnnnnnnnnnnnnnnnnnnnnnnnnnnnnnnnnnnnnnnnnnnnnnnnnnnnnnnnnnnnnnnnnnnnnnnnnnnnnnnnnnnnnnnnnnnnnnnnnnnnnnnnnnnnnnnnnnnnnnnnnnnnnnnnnnnnnnnnnnnnnnnnnnnnnnnnnnnnnnnnnnnnnnnnnnnnnnnnnnnnnnnnnnnnnnnnnnnnnnnnnnnnnnnnnnnnnnnnnnnnnnnnnnnnnnnnnnnnnnnnnnnnnnnnnnnnnnnnnnnnnnnnnnnnnnnnnnnnnnnnnnnnnnnnnnnnnnnnnnnnnnnnnnnnnnnnnnnnnnnnnnnnnnnnnnnnnnnnnnnnnnnnnnnnnnnnnnnnnnnnnnnnnnnnnnnnnnnnnnnnnnnnnnnnnnnnnnnnnnnnnnnnnnnnnnnnnnnnnnnnnnnnnnnnnnnnnnnnnnnnnnnnnnnnnnnnnnnnnnnnnnnnnnnnnnnnnnnnnnnnnnnnnnnntatcttaagtttatagtaggctgtatatacttctatataacgatttgggtttataaagatagtacagaggtagacaataatatcttctacatcggtatataggttatttaaggtcgcgcttattcttagggtaatatatagctatactttacctttatatcggctttatatatatagtttctagtagactagtaacaggtaatagtcggcattcgctttaagcttctatctaataactgtttcctatatttcgaaacggacttcctttctatcctttaatattagtatattaggtatcttcgtagacttctaactagtgattcctataatcagtatatcactttaggtttagttcattttactctaagtaagaataaggtaataggtaaggtcgttatacttatatatagcgatatctctataggcagtagccttattacattcttcggtagcttagttatattctattataagacgatctttctctatatagagtcgatcacattcttctataagtcgatcacattcttttataatttatctaatagcttccttagaccttccgttctctaagattaagacctagatttcgttatatatcatccggttattatcttcgactgtttagaactaattagctagcttaaggaatcgttccttactaggagttgtatatataatctcacagatagaaggagtcgaaggaccctccttagggctatcgcgtttaatactctcaattaggtcctatattttagtaggagttggggtttcagggttagtagcttcttctgtaagacaatctagtactataggttattttcccttaccgatcgcagcgatccgttatagtaggactataactagtcctattctagttagtttcgggataggtagggtgaaaccggactaggacaaatcgtaataattatccgtatagtcgtacagcttcagaagtttaggtttagggtgatacttgatattatattatataccagattccttttaacaaaagaagtgtatttctaatcgaatatcaagtatagaaaaggaaaagaaaagaaataaacgtgaaaacaataaataggcttttatacccctttaggggtaaagccctattctcgtttcccctagaaggaaggtgcgactgcctatgtaaacgactaacagtacaatcctaaacgggaaagtacgagtcccgcaagtgccaatcgtgacactaattatctaaaaggccgttaaaccaagatttaataaagactttacctttaaaaatcatatatagaggaagcgcctaccctactgtatttatacatttaattatgacggaaaaacggtggtaaggcgagtgtattttgtggcagaaaaatcttaataaattctctaactctctaaaactgacaatagtcctaaaacatgacaatctgatggacaacttagtaatcaaaacaaacaaaacaannnnnnnnnnnnnnnnnnnnnnnnnnnnnnnnnnnnnnnnnnnnnnnnnnnnnnnnnnnnnnnnnnnnnnnnnnnnnnnnnnnnnnnnnnnnnnnnnnnnnnnnnnnnnnnnnnnnnnnnnnnnnnnnnnnnnnnnnnnnnnnnnnnnnnnnnnnnnnnnnnnnnnnnnnnnnnnnnnnnnnnnnnnnnnnnnnnnnnnnnnnnnnnnnnnnnnnnnnnnnnnnnnnnnnnnnnnnnnnnnnnnnnnnnnnnnnnnnnnnnnnnnnnnnnnnnnnnnnnnnnnnnnnnnnnnnnnnnnnnnnnnnnnnnnnnnnnnnnnnnnnnnnnnnnnnnnnnnnnnnnnnnnnnnnnnnnnnnnnnnnnnnnnnnnnnnnnnnnnnnnnnnnnnnnnnnnnnnnnnnnnnnnnnnnnnnnnnnnnnnnnnnnnnnnnnnnnnnnnnnnnnnnnnnnnnnnnnnnnnnnnnnnnnnnnnnnnnnnnnnnnnnnnnnnnnnnnnnnnnnnnnnnnnnnnnnnnnnnnnnnnnnnnnnnnnnnnnnnnnnnnnnnnnnnnnnnnnnnnnnnnnnnnnnnnnnnnnnnnnnnnnnnnnnnnnnnnnnnnnnnnnnnnnnnnnnnnnnnnnnnnnnnnnnnnnnnnnnnnnnnnnnnnnnnnnnnnnnnnnnnnnnnnnnnnnnnnnnnnnnnnnnnnnnnnnnnnnnnnnnnnnnnnnnnnnnnnnnnnnnnnnnnnnnnnnnnnnnnnnnnnnnnnnnnnnnnnnnnnnnnnnnnnnnnnnnnnnnnnnnnnnnnnnnnnnnnnnnnnnnnnnnnnnnnnnnnnnnnnnnnnnnnnnnnnnnnnnnnnnnnnnnnnnnnnnnnnnnnnnnnnnnnnnnnnnnnnnnnnnnnnnnnnnnnnnnnnnnnnnnnnnnnnnnnnnnnnnnnnnnnnnnnnnnnnnnnnnnnnnnnnnnnnnnnnnnnnnnnnnnnnnnnnnnnnnnnnnnnnnnnnnnnnnnnnnnnnnnnnnnnnnnnnnnnnnnnnnnnnnnnnnnnnnnnnnnnnnnnnnnnnnnnnnnnnnnnnnnnnnnnnnnnnnnnnnnnnnnnnnnnnnnnnnnnnnnnnnnnnnnnnnnnnnnnnnnnnnnnnnnnnnnnnnnnnnnnnnnnnnnnnnnnnnnnnnnnnnnnnnnnnnnnnnnnnnnnnnnnnnnnnnnnnnnnnnnnnnnnnnnnnnnnnnnnnnnnnnnnnnnnnnnnnnnnnnnnnnnnnnnnnnnnnnnnnnnnnnnnnnnnnnnnnnnnnnnnnnnnnnnnnnnnnnnnnnnnnnnnnnnnnnnnnnnnnnnnnnnnnnnnnnnnnnnnnnnnnnnnnnnnnnnnnnnnnnnnnnnnnnnnnnnnnnnnnnnnnnnnnnnnnnnnnnnnnnnnnnnnnnnnnnnnnnnnnnnnnnnnnnnnnnnnnnnnnnnnnnnnnnnnnnnnnnnnnnnnnnnnnnnnnnnnnnnnnnnnnnnnnnnnnnnnnnnnnnnnnnnnnnnnnnnnnnnnnnnnnnnnnnnnnnnnnnnnnnnnnnnnnnnnnnnnnnnnnnnnnnnnnnnnnnnnnnnnnnnnnnnnnnnnnnnnnnnnnnnnnnnnnnnnnnnnnnnnnnnnnnnnnnnnnnnnnnnnnnnnnnnnnnnnnnnnnnnnnnnnnnnnnnnnnnnnnnnnnnnnnnnnnnnnnnnnnnnnnnnnnnnnnnnnnnnnnnnnnnnnnnnnnnnnnnnnnnnnnnnnnnnnnnnnnnnnnnnnnnnnnnnnnnnnnnnnnnnnnnnnnnnnnnnnnnnnnnnnnnnnnnnnnnnnnnnnnnnnnnnnnnnnnnnnnnnnnnnnnnnnnnnnnnnnnnnnnnnnnnnnnnnnnnnnnnnnnnnnnnnnnnnnnnnnnnnnnnnnnnnnnnnnnnnnnnnnnnnnnnnnnnnnnnnnnnnnnnnnnnnnnnnnnnnnnnnnnnnnnnnnnnnnnnnnnnnnnnnnnnnnnnnnnnnnnnnnnnnnnnnnnnnnnnnnnnnnnnnnnnnnnnnnnnnnnnnnnnnnnnnnnnnnnnnnnnnnnnnnnnnnnnnnnnnnnnnnnnnnnnnnnnnnnnnnnnnnnnnnnnnnnnnnnnnnnnnnnnnnnnnnnnnnnnnnnnnnnnnnnnnnnnnnnnnnnnnnnnnnnnnnnnnnnnnnnnnnnnnnnnnnnnnnnnnnnnnnnnnnnnnnnnnnnnnnnnnnnnnnnnnnnnnnnnnnnnnnnnnnnnnnnnnnnnnnnnnnnnnnnnnnnnnnnnnnnnnnnnnnnnnnnnnnnnnnnnnnnnnnnnnnnnnnnnnnnnnnnnnnnnnnnnnnnnnnnnnnnnnnnnnnnnnnnnnnnnnnnnnnnnnnnnnnnnnnnnnnnnnnnnnnnnnnnnnnnnnnnnnnnnnnnnnnnnnnnnnnnnnnnnnnnnnnnnnnnnnnnnnnnnnnnnnnnnnnnnnnnnnnnnnnnnnnnnnnnnnnnnnnnnnnnnnnnnnnnnnnnnnnnnnnnnnnnnnnnnnnnnnnnnnnnnnnnnnnnnnnnnnnnnnnnnnnnnnnnnnnnnnnnnnnnnnnnnnnnnnnnnnnnnnnnnnnnnnnnnnnnnnnnnnnnnnnnnnnnnnnnnnnnnnnnnnnnnnnnnnnnnnnnnnnnnnnnnnnnnnnnnnnnnnnnnnnnnnnnnnnnnnnnnnnnnnnnnnnnnnnnnnnnnnnnnnnnnnnnnnnnnnnnnnnnnnnnnnnnnnnnnnnnnnnnnnnnnnnnnnnnnnnnnnnnnnnnnnnnnnnnnnnnnnnnnnnnnnnnnnnnnnnnnnnnnnnnnnnnnnnnnnnnnnnnnnnnnnnnnnnnnnnnnnnnnnnnnnnnnnnnnnnnnnnnnnnnnnnnnnnnnnnnnnnnnnnnnnnnnnnnnnnnnnnnnnnnnnnnnnnnnnnnnnnnnnnnnnnnnnnnnnnnnnnnnnnnnnnnnnnnnnnnnnnnnnnnnnnnnnnnnnnnnnnnnnnnnnnnnnnnnnnnnnnnnnnnnnnnnnnnnnnnnnnnnnnnnnnnnnnnnnnnnnnnnnnnnnnnnnnnnnnnnnnnnnnnnnnnnnnnnnnnnnnnnnnnnnnnnnnnnnnnnnnnnnnnnnnnnnnnnnnnnnnnnnnnnnnnnnnnnnnnnnnnnnnnnnnnnnnnnnnnnnnnnnnnnnnnnnnnnnnnnnnnnnnnnnnnnnnnnnnnnnnnnnnnnnnnnnnnnnnnnnnnnnnnnnnnnnnnnnnnnnnnnnnnnnnnnnnnnnnnnnnnnnnnnnnnnnnnnnnnnnnnnnnnnnnnnnnnnnnnnnnnnnnnnnnnnnnnnnnnnnnnnnnnnnnnnnnnnnnnnnnnnnnnnnnnnnnnnnnnnnnnnnnnnnnnnnnnnnnnnnnnnnnnnnnnnnnnnnnnnnnnnnnnnnnnnnnnnnnnnnnnnnnnnnnnnnnnnnnnnnnnnnnnnnnnnnnnnnnnnnnnnnnnnnnnnnnnnnnnnnnnnnnnnnnnnnnnnnnnnnnnnnnnnnnnnnnnnnnnnnnnnnnnnnnnnnnnnnnnnnnnnnnnnnnnnnnnnnnnnnnnnnnnnnnnnnnnnnnnnnnnnnnnnnnnnnnnnnnnnnnnnnnnnnnnnnnnnnnnnnnnnnnnnnnnnnnnnnnnnnnnnnnnnnnnnnnnnnnnnnnnnnnnnnnnnnnnnnnnnnnnnnnnnnnnnnnnnnnnnnnnnnnnnnnnnnnnnnnnnnnnnnnnnnnnnnnnnnnnnnnnnnnnnnnnnnnnnnnnnnnnnnnnnnnnnnnnnnnnnnnnnnnnnnnnnnnnnnnnnnnnnnnnnnnnnnnnnnnnnnnnnnnnnnnnnnnnnnnnnnnnnnnnnnnnnnnnnnnnnnnnnnnnnnnnnnnnnnnnnnnnnnnnnnnnnnnnnnnnnnnnnnnnnnnnnnnnnnnnnnnnnnnnnnnnnnnnnnnnnnnnnnnnnnnnnnnnnnnnnnnnnnnnnnnnnnnnnnnnnnnnnnnnnnnnnnnnnnnnnnnnnnnnnnnnnnnnnnnnnnnnnnnnnnnnnnnnnnnnnnnnnnnnnnnnnnnnnnnnnnnnnnnnnnnnnnnnnnnnnnnnnnnnnnnnnnnnnnnnnnnnnnnnnnnnnnnnnnnnnnnnnnnnnnnnnnnnnnnnnnnnnnnnnnnnnnnnnnnnnnnnnnnnnnnnnnnnnnnnnnnnnnnnnnnnnnnnnnnnnnnnnnnnnnnnnnnnnnnnnnnnnnnnnnnnnnnnnnnnnnnnnnnnnnnnnnnnnnnnnnnnnnnnnnnnnnnnnnnnnnnnnnnnnnnnnnnnnnnnnnnnnnnnnnnnnnnnnnnnnnnnnnnnnnnnnnnnnnnnnnnnnnnnnnnnnnnnnnnnnnnnnnnnnnnnnnnnnnnnnnnnnnnnnnnnnnnnnnnnnnnnnnnnnnnnnnnnnnnnnnnnnnnnnnnnnnnnnnnnnnnnnnnnnnnnnnnnnnnnnnnnnnnnnnnnnnnnnnnnnnnnnnnnnnnnnnnnnnnnnnnnnnnnnnnnnnnnnnnnnnnnnnnnnnnnnnnnnnnnnnnnnnnnnnnnnnnnnnnnnnnnnnnnnnnnnnnnnnnnnnnnnnnnnnnnnnnnnnnnnnnnnnnnnnnnnnnnnnnnnnnnnnnnnnnnnnnnnnnnnnnnnnnnnnnnnnnnnnnnnnnnnnnnnnnnnnnnnnnnnnnnnnnnnnnnnnnnnnnnnnnnnnnnnnnnnnnnnnnnnnnnnnnnnnnnnnnnnnnnnnnnnnnnnnnnnnnnnnnnnnnnnnnnnnnnnnnnnnnnnnnnnnnnnnnnnnnnnnnnnnnnnnnnnnnnnnnnnnnnnnnnnnnnnnnnnnnnnnnnnnnnnnnnnnnnnnnnnnnnnnnnnnnnnnnnnnnnnnnnnnnnnnnnnnnnnnnnnnnnnnnnnnnnnnnnnnnnnnnnnnnnnnnnnnnnnnnnnnnnnnnnnnnnnnnnnnnnnnnnnnnnnnnnnnnnnnnnnnnnnnnnnnnnnnnnnnnnnnnnnnnnnnnnnnnnnnnnnnnnnnnnnnnnnnnnnnnnnnnnnnnnnnnnnnnnnnnnnnnnnnnnnnnnnnnnnnnnnnnnnnnnnnnnnnnnnnnnnnnnnnnnnnnnnnnnnnnnnnnnnnnnnnnnnnnnnnnnnnnnnnnnnnnnnnnnnnnnnnnnnnnnnnnnnnnnnnnnnnnnnnnnnnnnnnnnnnnnnnnnnnnnnnnnnnnnnnnnnnnnnnnnnnnnnnnnnnnnnnnnnnnnnnnnnnnnnnnnnnnnnnnnnnnnnnnnnnnnnnnnnnnnnnnnnnnnnnnnnnnnnnnnnnnnnnnnnnnnnnnnnnnnnnnnnnnnnnnnnnnnnnnnnnnnnnnnnnnnnnnnnnnnnnnnnnnnnnnnnnnnnnnnnnnnnnnnnnnnnnnnnnnnnnnnnnnnnnnnnnnnnnnnnnnnnnnnnnnnnnnnnnnnnnnnnnnnnnnnnnnnnnnnnnnnnnnnnnnnnnnnnnnnnnnnnnnnnnnnnnnnnnnnnnnnnnnnnnnnnnnnnnnnnnnnnnnnnnnnnnnnnnnnnnnnnnnnnnnnnnnnnnnnnnnnnnnnnnnnnnnnnnnnnnnnnnnnnnnnnnnnnnnnnnnnnnnnnnnnnnnnnnnnnnnnnnnnnnnnnnnnnnnnnnnnnnnnnnnnnnnnnnnnnnnnnnnnnnnnnnnnnnnnnnnnnnnnnnnnnnnnnnnnnnnnnnnnnnnnnnnnnnnnnnnnnnnnnnnnnnnnnnnnnnnnnnnnnnnnnnnnnnnnnnnnnnnnnnnnnnnnnnnnnnnnnnnnnnnnnnnnnnnnnnnnnnnnnnnnnnnnnnnnnnnnnnnnnnnnnnnnnnnnnnnnnnnnnnnnnnnnnnnnnnnnnnnnnnnnnnnnnnnnnnnnnnnnnnnnnnnnnnnnnnnnnnnnnnnnnnnnnnnnnnnnnnnnnnnnnnnnnnnnnnnnnnnnnnnnnnnnnnnnnnnnnnnnnnnnnnnnnnnnnnnnnnnnnnnnnnnnnnnnnnnnnnnnnnnnnnnnnnnnnnnnnnnnnnnnnnnnnnnnnnnnnnnnnnnnnnnnnnnnnnnnnnnnnnnnnnnnnnnnnnnnnnnnnnnnnnnnnnnnnnnnnnnnnnnnnnnnnnnnnnnnnnnnnnnnnnnnnnnnnnnnnnnnnnnnnnnnnnnnnnnnnnnnnnnnnnnnnnnnnnnnnnnnnnnnnnnnnnnnnnnnnnnnnnnnnnnnnnnnnnnnnnnnnnnnnnnnnnnnnnnnnnnnnnnnnnnnnnnnnnnnnnnnnnnnnnnnnnnnnnnnnnnnnnnnnnnnnnnnnnnnnnnnnnnnnnnnnnnnnnnnnnnnnnnnnnnnnnnnnnnnnnnnnnnnnnnnnnnnnnnnnnnnnnnnnnnnnnnnnnnnnnnnnnnnnnnnnnnnnnnnnnnnnnnnnnnnnnnnnnnnnnnnnnnnnnnntagatttataataggattaactataatagtaaaggttataataagaagtaaatactacggttagagatcacttttataacctagaaatcgtaagtaggtaactataattaaatatataaacttagtaagataggccctccctctatatattatttttaaaggtaaggtcttccttaaattatagtttaaaggccttcctagtaactagtactttaaagttagtctaaataagtagatattagataaaataagcctttattagctataaaagctctttattctaactacttcttcttatataaagggagtatatcgacttttagtacttaatagctatagaagctatttaaccctaaaattcgataagatttataagaaaaataagattataccaatttatatactactacatttatcttaccttttataatcccttaatatcagttattttacagtagtaaaacggtcgtatagccggttagttaagataaaaatatagactaggattaactatattaataaacttaagttcctagaagtatacccctctatataaattaaagctttgaaattagagacaattaaaaatagcttcttagcagctagtttaataccttttttacctaatcaggtactttcaaaacttaatatttatctttgaatactaaccccccctcctagtagggatagcgatttaagctagaattttaccctaaaaaccccttttaatagcaaagatctacatcgataggcttcgttaatcaaagctttacttcgtacctaatctcgaagcctaataagcccttctaagtgtacattagatcaacttgtcaaaggctgccagattgcaatatatagtgctattctactagcaaaagaaaacaaggatttacaggatgaaaataagaataagaagcaaaagcgggccagatctagacggcagatacctaccgaagaaggcctctcagttcaagaagcttctgaaataattgctggactggtagaagcatcagaaatacccctacaccccccggacggaagcacttaatcagggttggaaccacgaccacgggctgcaccaaggtgtagtgggtgtggaaagatagggcataagatcaataggtgttcagataaatgatcctttttagtttaattaatttaatggcgttttggttgaaatatattccttagaaaactatactcttgggtagggtggcggctcgcttacagtggcggctcgcttaccgattacgttactccggattaattgcttagataataccatagttaagccttggaagctcccgagtctggagaagtctccctaattaggcctagtcccaacttatactcgctaattctgctaattctattggcttgattcttataccgtcttttagaattctgccggtctaagtatgattacataatgcaaaatgaagccttacgtaaccaacaatgccaagacttagttacaaggcttgtagcttcttcgactgtccaatgtagatcccgctgtcatgacgacatatactaaacttcagtgttatacatagcattatgattgaacttattggtagaaaatagagcattccaatcaaactaaggcactatacacgcaagccaacgcgttccaggaacgagcgaagtcaataaatcttagaatcctgcttagggttggtgacagcatcacgtgcagagcctccgaggccatgacgtcttcctcgaacctgaaaaacttccccataagaccacctcgtctcttaatcctcccgagcttcaattgcttcccctctttggtccaaagaatctctattgctttagtctttctgtgtttgttgcttgtttactacagaattgctgcttctcgcatttgtttaccttcacccctcagctgtctttctgaagctctcaacaccccgccccttcgattaatccagaaactcgattttataagtgtcgctgattgacaacacacagcacaatgactctctactactcccttgtaagcctgacaagttccttctctagttgcttcttgttgtgtttctcaagaagttctcgagaatcgttgcagcctgatgcccgaaactgtctacccagcccaagcgtctccaccctatcgatgaactaacacaatgccctcatataggtattcctccttctggtgttcgagatgggtgtattcctggccctcgtcatccctctccctcatgtcgttaagcgcaagctgtttgccttcatctcggagagcccgatcatagccaaattacaatatggactgaaggtatattgccaatttgaaaccacgtttccggttacactgctaaactggcctccagattacattcatcttcatcctcattctgttcatcgactccgtgaaccgtgtgtaccgtgtgcagcaggagctgtccgccttcgccaaggacggtcccggcatggggtaagtaatcaatcctcaggcattctagcaaaatttctaaccattgttaccaacagagccgcccacctcggtaccgaccgcatggaggtccaggcccgcaagttctactcgcagcgcaacatgtatctctgtggattcactctgttcctctccctgatcctcaaccgcacctataccatgattctcgagactctccgccttgaggaccgcgtccgtctcatcgagggcgacaagaaggccggtggaaaggactcagcccgtatcgcggaggctggttcagtcggcgagatcggtcgtcttaaggagatcattgccaccaagaaccgggatattgagactctcaagaagcagtgtgagggtctgacccgcgagtaccacagcctgggtgaccagatttccaacgaaaagggtgataagaacgagaaggacaagaaagacctgtaaaagggttgcattgttcgattccaccggacccagactgtcgaagcccaagctttgatagactttcactcgcgcacctttacgtttgcgttggattgagggtctcattccctgtcaagggagttggaaccctctctgcaacaaaatcacttgatacattatggattaagtattgtgcgtaactaccctttctcgatgtatggactctactattatgtagagggagatgtgggaattgcaattggttcctatcgctgtattcctttccatgtactagcaaatatcttctaaggtttttcggtgggatccatagtgctgattctgtagcacttgtcatattcaatcaatattaccctttcatattcaattgtctattgatccccgtcatagccgcgagtgtccagtgcatcaaaagctaaggaccagaccaagaattgtcatgtctagagatcgtaaattacatagtatgtataagaaccagccgatcacggctgtggcatatagaaatatcaaaccaggaaggtccaaaagctaggatataccagctcctcttcaaagatccttcggacctgcgcgagcacaaaccgctcaaccttcccaacattcttcaatacctgcttcccatcttccttgcgaccaatctcactgtccacccggatctcctgcaacaacccaccctgccgcttcagatccttctccttctgatcgcccccagaccgaggccgaccatcatcactgggattttgactgctctgagactgttcagatccaagcagggcatctgcgtcctccggagaaagaaaacagaaatgcacccgcttgcggatatacgcaacaacggcaacaccgtcaaacgtgatgcccgtgacattcaacttcaacggcagccccacaaagctgggcatcgggtagtcaagcaggatctccgcggtcagggacatgcgcacgtcgccagcatacttagcatggcacagcacctggaagtcctccgggcggcgctcgcgcatgcgcggcgggatggggaacgattgatgctcggcggccgggtcgtctgatatctctattgagggctgcggcgcgtcggttgggtcgcttgtatgcggatttgacccactgctgccggtgtggccgagggaaggatgggaggagagtgtatttgcggttaaggggcgggagccggaattggtggtgcccaggtctggctctgcgaggtgatgtgtaccagcagggcgggctgcttgggacctgggtccggcacccatacctgaatctgaccatccgctcgcaaatggagtgccgcctgctacggcagcaaggggtgtctggtttcctgatagaccgcctagagaccgcatgtggtaccccaatgttgacgtaccgccgggaattccaggtgtactggcgcgcggcatgaaatgcggattaaggtgatcgcctagtggggatcgaagcgcggatggctggaagccttcaccggggtatggatggtgactgaaattatgaaggctgtgcgcggtgggattgaaggtcatgtcgtcttcgtatggggattcttggagctcggacatgagctcatctgaggtggaggtatcggcatcatcatcgtcttcctcgtagaaatccgcgaacggttcgcagaagtctttgatctcgagatctggcgcgatggtcccgaaatcgaaggagtgaacctgaaccgagcgaataaagcgcggtagggtgatctcctggaacttttcgtgtacgaacgaccggattcgctctgctagggcttccccgtccgggccggaggtggcagctgcccagtcgacttcgattgacatcacatatgcaatgctatagcacttgatgcttgtacatatcaggggagatggaggacctcgggagcccgtgacggtatcaccacgtgatatacggagtacatgatgacattccggccagttccatcgataccaactacatccgaagcagtgattgacgaagtgctaggaaatataatatattcactgtgcgctcactaattactacctaagagggttaatatccatcctcctctctggatacactcataccaataacttcaaaacattctcccatccaccgtagagccggatgtaagcacatttcattcacaaatcatatgcagacgctttccatcctttccgtcctttccatccgataattctgtctgatccgattttctcttcatgggtcccgactgttttgataatggccggggatccaacttagacttgtgaaagtcaatgatcaatattcggttaagttcagggttccaaaggatatttggatcccgaagatccccgtgagtaaccctcagcttgcgaatttcccttttcgaccggtgaatctcccggcgaagcaacgaggtcatttccatatgcactatgttctcacctccccagcccataatgagcatgtgagaaatgtctcccgcatcatggtagtagtccactaacaggtcgatagtaccgaggaaaacaggtactgcggacccttggactttgcgaagaatctggtaaatttctgcttcgcgggagacttccttccaaagccccgaagttgttccttttccaacgaccgtatagccataggcagtacatgtaagtttgaatggcgcaccatatgacccacatgttccaaaaggcgtacagtctttgtcacggttctcacctagttggattttcaataaacgcactagatctcctgcattgataggatgtttatgatcatctggactttgtcgatgaagtgacacgtttgggcaatgctcgtctagagtaccgccagtctgtagcccgagtaaacaccgctgagtgcaaaattgcgcatcgtggcgatatgactggcctcttcggtcgtttctaggctcttgccgagtagacggggaggatgtgacttgactgatgcggcgctttcgcctttcttggttcgtatcggaacctgatgagtttggcgactccgcacggtgtcggtcatccgttggtgcacacccggcaggttgagagcttgtagacgactgacgaccttcttccgtaggggcattagattgaggagaggaaccagattgaggcgacgggtgatagtcggtactggagtccggatccgtaacctcagagtggaaactactttcacaggatcgagggatttgctgtaattcttccttgggaatctcagaaagagtatggtcgaagttggttttccaagtacggagcaccgaccgcgcattagatctccatatctgatcacgcacaggggatcggaatgccatcagacaaagacatagtacatgagcaattgaggtattcggaaattgaaagttcggttcgctttttctgttaggatcacagaaaaagtagtacaatgtactagggttgtcgtatggaacgcggagtaggacacgcgcaatcccgttcgtcacataggaatattcgagtcctttctgaatcatcacatggtattcctggacaatagcggagcaggcgagtcgctcagcattgtacctagcctttccatcgacgtcgttagggattgtattagtatagactatcttctcccataagttcattggtcgaagccctaaacgaagagtttccaccgaaagcttgtgggggggtttatattcaaccgtcgtgaggatgctttgggtgtttccatcaatacgacggatccaaaactgatcgggttttgggttgggtatgctcgagggctgacttgtatccgccccaacagcttcggcgttcaaagcatttatatgagagctgaactcgattccatcaccaagcccgaactcctctcgagcaagaggaagtttgctcaataccgtgattatatcattgactggatattccacagcgtactgctcgtaatgctctatgcccttctcgctatcgatcggcttgctagtaaggcgttcttgatatccctcaatctggtgcagagaagggaaggcccgcagcgaatcctccgattgtaggtacccacacacagcggagtagagcgcttgctgttgagctggacaatcaacccacaattcgagtcgtgtcgggcaaaactttccagtgggggcgggtatttgacctgtggtcgacacggatatttccccgactctcaatggaagggagagtagggagtggcaagagcgcaggagttccatgaaagtggtcggtcgagtgcgctctttttcctttcttgcctcgtcttctgcctgtcgacggccctcttctgcctgtcttaatttctcctcaagctccaggatgcgataattgacatccgaaaagctattgctggccatcgtttagcccaagggatattaaaaatagctaacagctttgaaggttgctgggaaaataggttgctggaaggaaagggctggggatatgttagaacacggctcccggcaaaggtatatttccgactcagccaaccagctcggtggttgcctagatggcgttttcactcggcagaaaattgagcaaaaagacaccttagaaatacggctttagcaacgttcaggaagggatatgaagctggataatataaacaattgaggggtaaatggagaggcggtgaattacgccatgacccacagtttgaggctctgtacggcaggttttttgggtccatcgcgccaacctatacaagcccttagaagcataagattatttctgatctttctatcggtctttctatctgtttttttgaggtcttttttgatgtcttttagaatgcagccgctaaccaatagtaggggacctttgtgtcagatcaatctgaagaagagctatataagaaggctgcttcccactcttgcacttacttcttctttccttcttcatcttatctgacggttgtatggtttgttcagtcaaaccatgcatatgaggattttactcgcttgtcatttatggaaggaatgattccttccacatacggcaagagagtcacacactctgccctattggagtcagtgaggaccaaacagagatgcaaattgcgtttcattagctgcctcccagggggtgaacctataccaggatctaacgtaccgacctcgtgagacccgcagttgggatgtttgcgctgtacaagatggaacctctcccgaaggtggtacagcatggtgacgaaaatcccggaaagctatggtctacaccacctggtcgacaagaccattgagagacccgatcgtgacgccgcaaacgcagaaacttgaatgaaattaagtatgcaagtaaacacctgcttgcgactctgcatcgaccctaagatctttgtcgctggttgcatagctgttcggacgtgacctcctggtctgctcccaacatcacttttccggatatgttttcacggtgaagaccgacaataagtataaacggccactactttctaaggaacctttggaactgaggtggcacctgtctcgcattgcttgtatgcagggcagatgcgagaacgaagatccctggtggttagccatctcgtcatattattgctgcacatttgttcagttatatacacggacaagcaacaatggatgctatttttagaaaaggaagtgacatattttcttcttgccactagaaagtttcgcccgacgcgactcgaattgtggttgattgtccagctcaacagcatgctctactccgctgtgtgtgggtacctacaatcggaggattcgctgcgggccttctcttctctgagccagacagaaggatatcagcaacgccttactagctagccgatcgatagtgagaacggcatagagcattacgagccttaagctactactcggtaagtatcaagacaaagcggacttatcgacaatttgtgcaagcttgtggatcattgagggtcaagagactgttccatagcctatggatttctacaaaaatatatatatttcccttttgcttgatattgctgtgttatattggatattggaattacatacatcggccactataccagccattgagataaaattgtgtggcaatacaaaaagattttcataaaaccaggacagcatgatatactgcatatcaaaacacagctttgtggtctctcaatttgtccacaagatggtattgtctaaggagaggaagatccgagaacgcgtagatagacatatcaacacagagaaccaccggcaaacaatgacagaaaggacataaaaagtcaaacgacagcccgaaattccagaatgaccgatgtgaggcaacaaatgagatagcctccaaatagtagatgtgacacagtgatatcttcttcttccctgaagcagacatagacagggcggggaagccaatcactcgatgacagtctagaacatagcaacagacggcctcgagtctccgagtcatttggtatctatagtatctcgtcagtcaaacttcttgctggcaacagccgtctcaaaatatggaaggtgcaactcacgtcagaagccaatttaaccaccgtgacgagggcaattggagtttactcgtgtacgagtctgttccttgacacctggacagccaggagtgccttgatgggcacatgggactatgccatcttcttggtgcgtgcacccgcaggcgtactgaaagatgtagatggaacacatattgagggttgagtgaagaggtgaagttgtagaggatatataagcagatattgtgaattgaagaccacttagtttgaatgaggccttgaacttttgatattggttgatgtgatgagaagcaattagaggatcaaagcccggctttatagtattcgatggctacctcaagcgaagtgaatggcctgcgcaactcaatagagaaaagaagctaggaaattatcgacagtcgcaaaaatggttcggtccttcagtcaccttgcacaagcgctgtaactcattcaactagatgcgccatatgcagccagtgactcaatgatcacttgttgcgcagtcaaagagaaggtgacggtaggcacggaaatagtatacacatgcgccatatccagggcgtatacatttaccaacagaaagtagagtttgtggtaggtggaccgttagagtgtggcgtaccattggggagagtcaagatattcgatggggttcgctagcagcagcaaaccctaagcatgactaccgatgcaaattctaaatcccgcaggctgcaagaagcacttgacatcactctaaaagcgctgcagccagtgttagggcgtatgttctgagcgccaacagggacccctctcccgatggcaccccatagggcaatgctgcggttgaagcgttgatcaggaacatggtttgccccatctgagaaacctctatgatcctgatgtctaaccttaaagccatcgctcatactccgagaaaggcaactgccacagcttttttatgagcctcaccgtaggcggcgcaggaggtgtgaccaattggatgatacctgtgagattacagtgactcttctcgaattctgtatacttggatattcaatataaccccgggaacccgagtacccgcatagggctctagacacctacgttgttgcaatggactagataggtaggtcctgggagtaatcatcgagagccaacgaaatttaaagaaagcagtcctccaagcaaaactctaccagttcagtctcgatatggcaggagatgacttcattgactctattgcaatgggcttcgacttgtggatataggcgaataaggctcatctctatggcgcagttggtgattaccgcaagttctgcgcgattacaatgcgaaagactgcatggtgacaaggctttttcttaataataatgagttcagcgagtaaaggataagaacaattccagccaagaaaatccggacttgctatggttagtatggccggtgttgccggggtgcgatatcagccaagaggcattctttgtcgaatctagcgcgatcgtgctgtggggcctaggcaaaaataaaccaatactggcctatcagttgattctagagcgctaaagactggcgagaagcaccaagttcctcagccaaggcacagtagcattcatatgggttcgactgaggctctccccttgctgaggcaccgacccaccggaagatttactccgagcgagtagagacgcgcggggctagtggcggcaaggcacagcgcgcaatcgataggtcgagagcagttgctgagcagtctgctttgccgctgttggtttgtaacttttaggcattgcagagagcggagaaaagtaagaacggaaaattacttcaaaggttaatgtttgcattttactgcatgagggttttaccacgtgaggagtgtttccaaggttcagattcaaggttaaataaacatgggggaggaaccatggaaatgaaaaatctaatctgtttcttatctgtttgaaatactagcctaggagatccgcttgaaacaatttgcttctcacatggagtaagtgatatccccgagtgacgactactcgaatctagactgttgacgatatctcgattcgattcttggaacattggaatatgatgtcacatttgtgtctttcttcctgcaaagagtagcgaaattatcgctatcagggcccctaagagaaaagaccggggagatcaaaataccccagcatagccggtggcccaagcgcccatgcagcggttggaatgattggcgaagaggattatcgacgagataattcggaatgcgtaaggatttccacccgagaccattattaacaacacatacaggataggtgtggaggcatacgggagcctgtggaagccatgagttttcgtgtgtcggccccacatcctggctgttgatcttccgaggtccttgagtttcggctggcaacggcatatcgcgcgatgacgcttatacatattcgccatggctgctgggaatgactgtcagccgcccagactctggtgcgactatgccagagccaagagaggcgaggtcgaagcattcagagaaagaaaaggtcaatagtgaactcttggctttgatccccccttttttcggccaagacatgtgaatctccccagcatatttgggattctcctttctgggcttaaacggacgataatggcggggacctcgtatccactcctccgtacatatgatgtgctggatgcgttggatcggcattggatcggcgtgattcgggcttatcattgatacagcatgcccctcattctctacggtcctccctcttggcttatctcagtctggactatataagctaggtcgaaactccctgagatttcccactttcatccaaaacaatccatctaaaactctccttcaatcccgaaatatcccgtcttttaaccgatctacttcttccgcacaaatccttcaaaagttttctcagaatgtacacttacactgccactcaccgtttcttggtcctctccgccactgagtctggcccttactaccccgccaacaagttcctcgtcttgtctcccatcgaatgtggcccggatccccgcgtctgggaagaccagccccaaattgagaccagctcgaacgaggaggacactgtgccggctcctgccaaccgtgcccgcaccaatagctctgtctctaccgactcttcagtctccctcgatgacactgctgccctttcgcccggtttcctctaccttggccatggcaagaagcagcactaggtactctctatcattggccggcctagtggtttggtctcctttttcaatcctatttcgggatatttcaccgtcacagcaactgatccataattgagcttaccatgtgttttcttgttttcttctttcttttgcaatcttgatcaaattgagcgactccaatcgggagctttgggaccaccctatcatgggatagggcaggaaaatcaataggggtgttttttttttcgtggcgctttcaaattgccatatgcttttcattcagaatttgtctacactctcacgtctttcgcctctgggaagcatctgtattgccccattcggccagctagcaatcaatgaacaacagttcaaaccatccgcgtgattcttttccaccccacttttgccgccaaattgtgcacactagttacatagcccacctgactaaaatacaaggttgtacggaatagaggaatccccgtcctgtcggacgctagggagacccctaaatgcttgccaagtgctgccaagatgatgatttcccgccaagccttgtgcaatctgatactcccgccttggctggggtagggattgacggggtcaccgcggacaatgttccacggccaggcaacagtgcccattatatgtcgtggaagtgtatatgggctgcgaatcctgccaagcctccctgtcttactacgatagcttaccagtccacaattattttgttttcttttattgatccctccttgcacgttgattgtttcatggattagattggcttgttcgagttaagaccattcttggcccacaattgccagctcgattttctagtcttcattctttccggtaagacggtctgctcttcccccctttacccctcatcaacttattatttacttccccgcacatttctcattccccaggaagaatgcgggcctacaacatacgatgcactatttagcctactactatatagtttcggttcgaaatttcaagtccccgtgaccaataagacccactaatttcaaccacatgacaggtgttacgcgagatggactgtaaaaaggagaattagccgagtggcttttcaagattcgagttggctagaattaggtacctgtctaggtactcagggcttgggctagcactaaggttctcacgggtcaattgctaatatccctggttctgtgagtaatagatctgtgttactgtgctttacttttagtacccgtttccccccctctagatgctttgtttgcgagcctcgtggggactgcacgtactttattttgaatttgcttaggaaatgtccgatattatccatttatcttatatacattttcagaccgccgactcttaggaaaggggcaatgattgtgttcctccgtctgaggtatttcaagatatagctcgaggactgtatacaacattgtttatctgcttacgcttctaaaattaagagcaacttcccaatgaaagtctgaaattttcattcaattcatgatagtgacatcgtcctcgcagatcaaccgcataggatgcttcggggacttggcccttaatctcatcttaatcgcaacgccctcgttatgagtttgatattcaccgacgttcaagcctcggatgagacacattcttaacctcttcctccagatgatgcttccacttgtcatttcactacaaatatttccacagacaaagcccccgcgaacgggaacagggacgggatccaaaccataccacacatgaatattgatctatcaccgcaatcttcagtaaacttcgcgctgtttggagacctagttgcgcaccgaatatataatatgaatcttgctagctgcgagttccaaaattcggcgcatcaaaagagacttcgcattgccaaccacgagagtttcgtcttctggatactgtaagtaggaaagcgcaggagaatataaattttctataccgacgaccattgcaattacgagttccctacgtacccccacgacatcggagtcgtcctcgatgtgcacgtacgccacatcggaaggtatcagactcccgtgaaagtctagagcagggattacgaccatttgaacgatgcgaacagctcagtggactctataccatccgaatgtgcgtccagcacccaacctgccctaccacgatgatatcaaacttgaagaagacggtagtcgaagaatacataatgataaaagttgcgacgcgcgacccgaggcgtcgaaactaattggtctggtatagccaaagagtgagaatgtaggggatgataatgaaatatattctttacaatatagctagctgctccgtacacaaggtacttcagggtcaactaacgatgacggtaatagatacctccctcgcagccggttcccatatataagacttgccattaattagttatttttccattcctaaatggtcttcccaaagtcctccaaggtgataatagcactagttaaatacctggaattcaaatgcgtaagatgtaagttggcgataaatgtaaattccctgggcttgaatacaacttcggatcaatattaatatcgctctagaatatgtcactacagagtttctgtaagagtcatgtcactgtagtgcccatttagagtcatctcataatcttaggacgactcatttttcatgaggaaactgcccatgacccatactcattcataaagctctaattttgtagcaaaacgaaaactatccgtatgattcctatgcactggcaatgccatcatataatcctgctttaaatctttcgattatgtataccatacttgtaaaaaggtggccagcagtcattagtccgctgagacactatagggtcgagaaatcaaatgaccccattttatccgagtctgcatacataaaggacacacattaagacttgatgcttctctgtgcagtaactggaatttagggttgactaaatagtatttgtcggcgtttaggcaaacttcgtatatctgacttgatgttattctcgcaatattgaatgaacgtggagaactgatatatctcgctatatagatcaatctgtatatttaagttgtatgttacacgtcgttgatccaatactactctcaattatcccgtgtcgtgcattttgaaagtgacatgctatttttggctaccgtctctggtgggaacagccaagacaagcggagcaatggatattgaaagattatatcagcctgaatcagactgcagatctagaactataaagtacgacgctgtaatcatgactcaataaaagtggtgcagcgatattataatgcataataccggccagtttttggcctattatgattcctagggttatctagtgagagctgagtacagggaatgagccttgatgcctgtagggtaaaggggacaccatccgccttcgatgtgcgcagcgagtagagtagagacgatgttgttacacttgcaccgtaccgttgtgagacgaatcctacgatatacacctaaaatatcaacgaattacaacataattattggttcagaaatgcggactacaccgacacatacatgaaacacaggagcgatgcttttgggaaggatctcctttttgggtatccgtatataggcggtatagattggctcaactgcgaaatgtctcacttttaattactttggggttgggggtatattactgtacagctcgttctaccccaatacattgtaaataaggaaacaggttgggcttgtgaagtcatcgggaaatgatgatacataatggcctgatccggcaatgttgattactacgcggggtggcgacgaagcccgaaataaacccgaatgaacagaaacggaccttcaattgttagttttagctcaaagtaagaaatgacttagcttctacggggtagttttacccatgttctttatatgtatgttgtacaaagtactaacgggcgatgccgagcctcggaagttcagaatgtttcatcgtgcccggagtacgcgggttttccgctaatatattacttagttagttatgttaccgaggtacgtatttaatgataattaaggtacggagtactccgtatgttgtatggagtattattgttagcctatttctttgagtgtcttttgagggcgctaaggaatggaagctgcccaactgcttctgccgcgtttctagcgccaaagccaagaccccgttgtgttccgactgaatcgccggtcatttaacttatagtttccaagccactactatttccaataaagagatcatagaatggggtaccttaaaatatatactagagtgctatattgttgtagcaacaccagcccccggttattgacacctgctccttcaaggctatgtaatgacgaagtgttaactccgccagatctcttatctgagattgccccttgcagatgaccccggatttagcgtactagtatctgagtttctttggcgcatctatctctcgctttacatctatgttatatagatctaactcacggtcacggtccccagcgaatataggtaggaagtggagaacgtttcttcacaatgaaccagaaaatgactcaataattggcaggaggaagtgttactagctgctccacttacggcggtggtcgggaggacataaaataataatgaatatcattccccgtcggagtacggagtaaacaggtgtccattcgatgtaagtgcgttgctcaacataactcaacaaagtcaacagtattcgactacgctacttatcagagcagatattattcccgttggtccgcaaagttaatatcaccatcatcgactcggccagttagggccagttgcccaggtagtccccgagccaattaaaccacattagtcataagatacagtacactagcccgtttcaggtaatttggtacattaccgatcatcacgctcgcatcctgcaagcggtgtgcacatttgctatatacgctttcaggtagtctagttgttgtttctcgataatttgaccatggtagcccaagatctgtgaattaatccatcaagtgatatagtatgatactatagagagatcattattcggggccagctcggggccaagatccgctaaggaaaccggtcacgtgggtaaataccgtaacagcgcttgtccaaaaccggaagcgttgccatctcataccccgtcttcatgagcccttgcccctgctgttcctcgacttatcactcttcgattgcagtattattctcacttattcaaccctttccctaagtcttcggattattattagaaaaagaagcaaagggacctacactccttcaagtgactcgacgactttctgccaaagcgggacatcatccgagggtggactcctgcgcccaaaaaccgccatccactcaaaactgtcgaggggcaccgactgtttcaaagtcgcattcttattctcttcggattttatctgtgtgagcttcgcgcttcaacgcgggactcgaagaaaccctgttatctataagcctctcggatttggcgtcacatcgcgcaagaccggacagggaactaggatatcgagtcgtcaaacctcgacttggaattcttatttttactactcaaaatttggtatcagcagtttgccacgatgactggtgccatgcctattgatatttcctcccggcaaacgacctcggtgtcgccgccgggtcaacaggcgtccaatctgacttcggcgttgcaaagagcgggcaacggcgagcggacagggagcttttcacatcttcccggcggaggactcggcgtgttcaaggccccaccgcctcgcaaggaatcgatcggcgcaaccacaacacaatgggggaacgggacgaaacctatctcgatgtcgggatctgctcgcgacaaaggtcgccgtgagtcgctcgcagggagcttggtgggtgggatgagctggggtggtgtatccgttggtagttggatacgtgatgagtgagtggcctgtccggacctagaagccgcgggggaaatgcccaccctgtgttgctattgtcgcactgcatcaagagctgaccaagggaaatccccgcagtatcataatgactggcacgtcaccatttaccttccagtcgccatctttccattcctcatcgtatctcccgaagctggaagcgaattttatgcgagactttgcgtgctgcggtgtgacgttaccgacgctccatgacctattacaacactacgaagaagcccatgcgaccaagtcgcccaatcaaggccaccgccagagccagggtgaaaatcgagctgccttggcggctgccgcaatcgcacaacaacagaaccaacagcatggcagccaaggacgtggcctgcagcctgaccgcaccctggatatgcagcgcaagttgggccagaatccgtcaccgttgcagcacgcagacctagacacaatagacgatatggagttggacgacgccctaggagacggagacggctcatcctcgcagatgttctcttctcagctgcgtgagggtggacagggcggatatggtaactccaaccagcagcagttaaatctaagtatgcttccaagccaccaaggatttaacacaccctcgcaacctggtacaccgattggatctggacgacccctttcactgcagaacaatccgactgtttcttcagtcaacacccccaccttgatggccaacccgctccaaaattcgcaattccgaaatacgcccgattcatccggaccagggaccccggccgaaattgacgaaagcatgatgggtgggttcggtgatctcagtatgcaaaataacaccatgggccaaaatcagaatcagtttggccgcttcaatgggaacaataatgatatggtcgatctttgcatcgacgagccggctaagcggctgtttagccccagtggcggtatgggttcgcccaacgcccactttaagctcagtggggctcagtatggcccgaatagcgatattgcacgacggatccgcgaacaacagttgctcgctggggtccccgacactactgttattcttcctaacgaagaacccaagccgttccgatgccctgttatcggctgcgagaaggcatacaagaaccaaaatggactcaaatatcacaaagctgtaagcttgatctccccctacattcgatattatttttctaaccgctcctttttttcagcatggccataataaccaacaactacatgataacgccgatggcacgttttcaattgtcaacccggagacatcagcgccataccccggcactcttggcatggagaaggaaaagccctaccgctgcgaggtgtgcggcaaacgttacaagaatctgaacggactcaagtaccataaatcgcactcaccaccctgcaacccggatttccagcttggaggtcgtaacctcgccctcggcggcggagtcatgcacgggcagaacatcaacgttgctggagctggcctccccggaattggcgaagaaggtcttctatgaacccgtgaacaaatatgtcattatgtcccatacataattcctagctaattgacgcgaacgatctcgacggctttcaggggtgaggcactcctgcacacgatgtcatgattttgaattgggtccggtgactttggagttattccttttctttttctctcttcgaaaattgttccttttggcttacttattgactgtgctttgtgatgccctgcttttgcttttcgttctgctgtccgatagattctactggcatgatggttttacccccacgcttgatatccctcgccgttttcagatctacctacttggcctggtaatagaggaacttttgagcgctcaggaccaagatcaagaccgtctctcaccaaagagccgtctagaagagacttgcaattgcctgcttttacgctctgttcatcttgttttgcttatacggcattcgcgtctttcacgggagacaaattagaggaattggatatctcccgaaactccccactcccaatcctgctattcatttgcttttgctgcgtccttggaaagagcttcgtgccttgttttcgcgttcgtgcccccgttctttgcgttcagtgtttttttgctcatgtgccattgtcgccttgggtacctggaactgaacaccatcaagatttggaatctggcaagagatttgaccggtccatctggtacgtgtgcgaggtacgagttccaggtgtggttacttctctcccctctttcacaccgagttggtgttcgctttttcttccatgctcccttctatctagggattggatagggactggatttgggatttgggatctgggatctgggaatcttaaaagtgatttctcggcgttggatcgttgtagatatggattttttggatatgattcttggctctttttggctattgttatttatcttcttttctttccccttctcttgctatttattcatatttttgactttattttcggtttcttgttattgtagatccgcgttcgggactaagacttagtctaagggcttaactagcaccttctatccaatcaatgttatttttgtctcgtctgctaagcagtaatgggagatgatactcaggctagtggaagttgttcagagtcatagtttcatttgtgcttattgtgaccagtaagatctctttcagtctagtacaaaaccaacctcgaaggcatggcaagaagcaaagagaagcatgtaaaaaaaaaagcaaaagcagaacccaccctcacttgtaagcgccacgagaagctagaaatcaaagaaaaaagcgtagtaaaagacccggttgctgaccatgtcgatatttgggtagtgagaatcatgaaatatttcgcttgcacaaaccgtttcgagggcgtgattgaaaagacgtagggattggttttcgtttgtgccatgagatagagcacatgtaaggggagaaaaatgttacagaacgaggaaagaaatgtcatcaatggagatcggaagatttgaaaaagaaacaaggagtgatggtgtcatttcgactaccattcgaattcaccctggcccttgtggaagacgtatctagttcggttagtatatgcataacgtgggagagtgggatgacttactctttgccaccagtggtcaagatgccatccttcagagtgcacttccacttgttcttcacgcgctggactttatcgtatgtgcaaagcatgacctggccctccgattcatctgcgtcatggtcatcggcaacgaggtcatctggatcatccaggtccgaattgatggcgtcttcatcttcctccttgatatcgtcttctgcaccatcaaactggccagtgacgcggggggtagatgaaggtgacccgggggtatcttggctgagaggagctgtgagagccacacggcgagcgaccctagaagaggactcatgctcttccaagggacgaaggagaccaccggcctcatactgagacatgcgctgcttgagatgctcgcgcagaagtcggtcaccttctccactctcggcagctgctctacggcgtgctacctctgccttccagtcggtcaatgggtcacctccaccatcagtctgtccaggacccatgtgtgggtaggcctgttcttgtttgatttgtggcatttgcccatgggcattggggtgcatctgcggatatccttgtccagcttgggcctgggcttgcatttggtggacggagttggcggctgcggcgccgtatttctggtgaagcgcatttgcagcacggtcgcgagccgactgagggttaagaccatgcgggggcatgggtgtggtcaagtgctgcattccgggttggccgttggatccgggctcggtcttgatgcgaggcccacccatgggaggcatagtgtgcgagggcgcaacttggggaattgaaacaggctggtggacatattgcggctggggaggttgttgtcggggaacgttggaggggacagtggcggtggggaggggaacagagtgctgttgagcaggctgaggagcaggatcccaggggaaatgagcgacgttcacagaagaaagcttgtgttgccaggtctgtatagatattaattagtgtcgggtctgctgtatgagataatcaagaagagactgagtcttggcggtctaaaagcgcctaagcgggtatgagcggcacatataaagggagcactcataagccggtgtccccccataagcaccgcctcccgcaccacctcgcccatccccgcttttggggaaatcatccacaccagactttgacaacacaagatagacaatatgggtagggaaatatgctactaacctcacggagatcatgcagagtctgctgatcgacaccactttcctcaaaatcgacctgggaggcatcacagacctcctggatgaccttctcgaacaccgcaccctatgaaggcacatatgtcagctcttatttcaatggaacccccaagatggattgggagaacatggttatgagtcaagagtaagtcgctatgcgagcgacagctgggaatagacaggtggtcgccagagaagagttgggacttaccacttgctggttggacatgattgctgagtgagaacaggccgatgagctggtggatgattatgcgaagggatcagagagctaggaataggtgaatggtgaaatgtactaggtaaggatagcttgactaggaagtaaagtgctccgtcgcaactatcaagttgctgatcgatcacacccacgaatgacgcaataggaagcaatttgtgaatcgatagtttgcacacaaatagaaaagagaagaaatagtctgaaagacaagtgccgcaagtgcaaatgtcagaggaaagcaagacgatgagtttcgcgatgggttagcgaaggtgaaagtcacggctctgcggtcgaaatcccactgtatccctgaggcttagtcatcggcgactaacccactgcgcactttcaagtagaaacggaagtgaattgaaagatcagagaaagaatacagatgaaagagatgatcatggacgagcaaagtgaattaaaacagtcgtaggaatggcatttggacaatttgtacagccagtttacggaaaaatagatacagagaacaacaccatcagaacaccgaaatcttccaaagaaccattacaccgacattaatgtcccggctcatcaatgctttcaatatcacaatgaacaagggtattcaacaaattaaagcaaaaaaaaagattttccagtcctttagcggatggtcatagacttggtcatttgagccttgctgccgacaccaccctcacgagaggaggaggcactgctaccggccttgcgctcaaagatcttccagaacttcaggctctcatcagcagcagtggtggctagcatctgtccatcagggctgatagcactgtggaggacacgagtctcgtgagcagggatctcgacgttgcggaccaaagttggatagctccagatactaagagagttgtcggggaagccgctagagctaacaatctcgcggtagtggttgctccaacggagagaagtgacttgtgagccagtgtcaatgctgttggtacgggcaccggtggtggtgttccagaagtgaatgtgacggtcgtaggaaccaccgccagtggcaagaaggttggattgccatggacaccagctcaaagccttgacggcggcgcggtggttggtcttggtgaacttgggagcgctcagagaacgagcatcccaaatgttgacaaggttgtcatttccgccagtagcgagctgggcgccgtcagagcgccattcgagaccgcagacctcagaggtgtgagagaccagttcagcgatcttgtgctctgcgatgcgaacatcgtggttatagacaagcccactacgggctccagtggacagagtgtgcttattccagcccataacaccgacgcgggagtcgtggccgtacatgctgcgaagcttagaaccttcctcaacgtcccaaatctggacctcaccggttcccaagccaacgccaacgtaggcaccatcaccactccacttcacgctgctgacgtatgtgtcgggggaggtttccaaaaggcagttaacagagccggactcggcagaccagacatagacgtttcgctcgagaccgatggcgacctggttaccagagctccagtccagcaaattgaggtagtagtcatccaaaagaccgggggcgtccaagacccgttcgggcgcagtttgaacacggcgacggaattgggcagatgtagatttggcaggtcgcaggggacggttatattgagcacgaagatcaataggcttcgatgactcgggagggggaggcttaaatgcgaggatgcgagtgttcatgttcaccccacaagcttcagccagagatgatttgtaggccacggcatcgggagccgggcgtgtgtaggtaggaggatcattatcgtctagacccaagctctccaaagcagcagttaggtcatcatcggatccacgcgtgccaatgtcaaaagcgctgactgccgaggcgaggactgatgatccatcagccgcaccgctcttagggcgctgtttctcttctggctttgcggccccgctagtagccaggccctcacttgcggtccggttgggaataaaacggtcaccagcgttgtgaggaatgcgcacagttgtcttgctggtacgagaccgggtgggaatctcccggcggacatgctccttggtaggagtgttggctgtggttgcacttgtgccggtcaaggtccaatccgagacaccgagctccaagtgcttgggtgatttgcgggtgcgggtgatggcaatgtttgacttgttcgacttggtcgccttgggagattcacggtgggtggtgcgggctgcttgagctgcttttgagatggacttggcgaagtgggcagagaggtttccaccgtataccgacttggtttgactgcggccagcctcggactggcgaggaggaggggtgaagggtgacgagtggccgcttacgcgggggttgggcgaaggactcagaggcatccggcctccagcggtcttggaagagaaaagcccatggtggctcttcaccggagttgacgcagtaacagaggccatggtaatatatgatcagagtagatgtaaaggatcaaccccaatagaagatgcaatacgaatcaatgcagaccaacagaaaagtatgcaattgagaatagtgagattgaggaagaaaaaggaaaggaggtcaggagacacgcgaataaatagaaggtagctatggagtactatactcgttgctgaaaagtattgaggctctccccatagcaacggttacctgagctacatagaacgctaacctgtattgggactagcgtcgacataccacgcttgcctttttgggtgacacttgtcttggcattaaattccatgccaatagcctcttaattaggcaagaacaaagaaggcgagaggctatacagaatatatgtttgatagacctcaaatgaagaaaatgccgtgacctacggtgccagttgcggatacaattcatagccccccttttcgccactgggatggcgcattcatctcctctttgcaacccccaccacgctcctctcacccagttccaccgagacccaccacgacttctccctggtcgggatcttcgaggggttttaagccgatatcctgctgtactccctctatggcaatgcaggacgcctacctgatgcctaccagccaggccggcggtcgtcggaccagcgccgattatcgacccagcataaaaaaggcccagggccatgtccccgcgtgcctggtcaatgcctcggtgacgtactgcagcaatgatcgcatttatgcgttcgggggttttgaccagtttactgatgaaggttcacatcaccttaagctataattctaaaatggcactaatgatttttagtttacaaccacgtgctccggctggacttggagactttgcgctgggagctcgtggacaactatggcgatatccccggagttcgcatgggtaatgattctctcttctcattcgtccatgtttagtgataaacactctgactggaaatcttattttttatagggcatacggcgacattgtaccaaggggataaattgattgtgtttggaggcgaaaatgagcatcgcgaatacctctccgacgttgtcatccttgatctcaataccttcacctgggcactccccgaaattcgcgggtcgatcccgcgtggccgcgcccgccatgctgccgtcattcacgaagacaagctttttattgtgggcggagtgacaggtgtgggaggcgtgacaggggagaagaatgtgatattggatgatttgacctatttggatctacaaacatggacttggtctcggacatggagcttcactgctcgcttcgatcatacagcttgggtttggggcacacggctgtggatatttggtggattgggtccgaacatggaacggactactgatatctggtggctcgacctcaagggatctccttcgttggctggaaacaccactccccaaggtagcgtcaactccctgggcatcaatatttcgggggcttatctcccagactctatatctagtcctcatcaaatgtctccccgctccggaatctacgctgccaattcaggcagtgtgcaggtacgcaatttgggtcgacgcaagccagtcgcgcccggtgccatatcttgtcttaggtttgattctggtcctcatgtcccctccttgttttctggtactcattttcattcattcgcctctggtgtcctgctcgacctaatcacgccgtcggagaccgtacggtcgcatgattgtaacctgtcggctctggacctcaactcgctgcgctggcaacggctggctgatggtcaagagatctttcggccgggatatcgatggcactattgcacagtcaatgacacggggaccaaagcatggctcttgggatgtagtcttgatatcgcgaatgtaccaggcggaagcgacgagaatcatatgagtgaagtcctgactatcgatttggaaaagtatggtttgctaggtaacggactgtcgtcagaaccccccgaacaaggcgcaccttggccgtcagatccaatgggctcctctcaggtttccgggctcgggaccgatctagccgctgttttcgacgaacctcctgagtctggaagtggtacagactttgtcatcactgctattcgtgacgatcatgacgggtccatatcggaagatatgggcgacacgccgtcggtttccccaacccagacccagccgacctttgtggcgcagaaccgctggacctcagagcccatccatgtccatcttatcattctccaggtcaggtggccacatttcaaacgcctgtactccgcccagatggctgagtaccacaccaagcggatgcacatccccgagccttattctgtcgtgcgcgcgtttctctactacctgtacacagacagtatctccggccatccagactattgcttgagtgccatcgatgtggcgggtatgcttgttatggccaatctttatgacatgccgaagcttcgcctgctgtgtgtcaataggttaagccaagagcttgacgtagacaacgcggccatcatttgggaacgtgcggggcggaccaatgaacactggttgatgcgccgagcagcacagttttgcatgacatactggggccgtgtggtacggacagacgggtttaaatccctcagccaccagagtttgattcaactctgcgaagtggtggatacagaaggtcgcgtcttcgcagggcctgaattggaaatggtcacattcggagcagattgcctaagtgaccgagataagacctctcgaatgcggctgggatctactgccgatgagatgtccgaggccgacgcagacgatgaagggatggagatctcatgaattgcatgaattgcatgaaattgcgaattgcacgaatggggcacgcattatattccggagttcttggcggatcatttgtttattaggttgtattgtatttacatccatctctaccagttttgaatatacttcttccacttctttgtgatcggccgttcaaccgctctagggctggcgttgagcccattcgtcatgagatgtggagcctctcgacgctctcgacgcggacctcagtccggatcgcggaggtcattcctgtcacgataaggagctctccatagtggtagactcactggatttcaagaagataaaaattaaatagaattagataaatatcgatgtgcgctcgaattaaacaatcggattacacggcttctacagttcctgctttgattaacattcattcacgtcgccatggaatctaagcaatctactcttccctcggatttcctttgggggtttgctacagccgcataccaaattgaaggagcagttaacgaagatggccgcgccccttcgatatgggatacattctgcaagatccccggcaagattgccggcggcggaactggagatgtagcttgcgactcgtatcaccgcacacacgaggatatcgccttgttgaaagaatgcggttctcaggcataccgattttccctttcatggttcgtctctttgtgttccttgcctcgagtttcaatctttggaaatattttaaccagcttgtcaaaatctataggtcccgcattatcccactcggcggccgtaacgatctaatcaacgagaaaggcatacagttctaccagaagttcgtggatgatctgattgatgcgggtatcacacccatggttaccctcttccactgggatcttccggatgagctcgacaagcgctacggtggacctctcaataaggaggaattcgttgccgacttcgcacattatgcccgtgttgtattcgaggcctttcggtccaaagtcaagtactggatcaccttcaacgagccttggtgcagtagtgttcttgggtacaacaacggttccttcgctccgggccacacgagtgatcgcaccaagagcgcggtgggagatagctcgactgagccgtggattgtcggtcatagcttgctagttgcccacggagctgcggtgaagatttaccgcgatgagttcaaagaacgggacagtggtgagattggcattacgctgaacggtatattcccattcttcctgcatctacggagccgtttactaatcagaccatcgactaactaggtgactgggccgagccctgggattctgagaacccagccgatgtagaagcctgtgaccgcaagattgagttcgctatatcatggttcgcagaccccatctaccacggcaagtacccagatagtatgatcaagcaacttggcgaccgcctgccaacctggactccggaggacatcgcccttgtccagggcagcaatgacttctacggcatgaaccactactgcgcgaacttcatccgcgccaagacaggagagccggatatcaacgatgtcgcgggtaacctggagctcctgctcgaagacaagaacggcgtgggtgtcgggccgatcacacagtcgccttggctgcgaccatctgctatcggattccgaaaactgctcggatggctcagtgagcggtacggctatcccaagatatatgtcaccgagaacgggactagtgtcttgggtgagaacgatatgccgcttgaggagctgctcaatgatgagttccgcgtgcagtatttccgggattatatcggtgctgtggctgatgcgtatacccatgacggggttaatgtgcgggcgtacatggcttggagtcttatggagtatgttttgagcttagttcctcgatggtatatatccgactaacttttttacttacagtaacttcgaatgggctgagggctatgagactcgcttcggtgttacttttgtcgactatgagaatgaccagaagagaatcccaaagaagagtgccaaggagattagccggatcttcgatcggttgatcgagaaggcctgagatagatgcggcgctgattgatatttacgctggtagactccgaggactgctatgatacctagattctatacgaatttttgaaggcctatgatattacattctccagttatgccgtgagctgtattgttcggtacgcagtatagaaaaacagagatgaaaggaggtacagtatgaagtagctgcccttgtggactgggaagcggttggatggtatcggaatactcccatatcttccccctcttgcagtggattgacgattggccaggatatgttgagaagattgtcgatcctttgccgctggaggatgccatgatgcgggttgtctttaatgatctagaattttagagcgagataacaacacttgtcgatcacaaaggcttgattgtgatttgctcaagctcaagtcacggtccaaactagagcttgatagccagggattcaataatgctccaagcttgattttatttaccttaaatgagttgattaagccttgccagagagtaaagctgataattcccacaatataattgatagtgatcgactttcgcgagtctatcatatttatgaccgaggccgatactttatcttcctaaggctaaagttcgtggaacggcataatttcgagcagcgggtaaagatccattagaagtgactccagagcaactcggaagtagcctggatattctccttcttcgacctgacttccatgatcaaacgatacatccaatacatacacccacggcaggtcggttgccatagagcccatagcaactgaatcgacaaccagagacacaccagtgtcaagtctcggagcgataccgttggactccttgtactcatagtattccctacggcgagaatttgtaaaaagccatcatacgacctcccgagcctccgtcgtaaggataggaatgagatcttactgctggatctgtttatgtgtggcgccttgtaaatccttgtcttcgtagcttggcatgaagcatttgtcttcggcgttcttccacccgcggattttcttggtcatggtttcctctatgcgcgcgtagtctttctcccactgctcccagcgttattgaccagagtaatcggttcggaacctgatatatccaaagtcatcgtatccttccctttctactacctgcacaacgaagtcgacactttcttcaaagagtggcacccccggacaaggtggtaggccccgctccacgcggagtctccgtcgatgttcgttgtggattgcacggccgatcactattcggacttgaacattctcgacagaaactaaattcttatcaatctgacggagttcctagacgatctgtattgaaaggagaaataattccttgttttagtggaagaaatctcaaacatttggttagatcacccacttcttctggtatctcgcgtatattatcaagcagtttgaagtcgctccagggtccatcctggcggtacacaagacatttcggggctgagaatcgcagacgtctcagaaaataaagcacatagattgaaagaaaagaacgtctatacaacataggaaggagtgtgggaaagggaagtcaagaagaaatggatagttggaagcagtcacgggtcatgaaagcttagttccaagggtcaaagaccctgaactggagcctgggctggagcctatgctagtgcctgggaagatatcctaagcccaaaaaggcaaagatttattttaagcttctcccgccccacttccgagccgaggcatcgcgaggaccgttgataaaaccggcggtgtgcagtaaatacccggcggtgactacaggcaactggcagtaatagtagccgcactccgttccttcccttttgagttcaccagcatggatatatctcagatctccaagcagcttttaccagcgccgaagagattcccagactgctgcttagccatctccagcaccttaatcacctaccttgcttcgctcctccccgaaaagcctaaattcactatctcaatcggcagcggatctggtctcctcgaaggtctcattgtgcattacgacaggaatgtatcagtggagggtgttgaggtggattccactattaatcggtacatcgccgaagaagatatgaatgttgtcggcggaggttggggtctctggtctgccgcccaacaggcagcggcgtggatgtttgtctacccacgcgacccaaaactcatcaccaaatacattgataattatggtggtcaaaatgtggattttattgtctggcttgggcctcgggttgattggccagactatgagacgcggttttgtcaatctccattctcggagttgagttttccagatcatatcggattaacaccatatgagactgtggtggttgctagaaggccatgttgatatgaactctgcattttgacttgggaagattatgttatacgactagtagtgcattggaaggctttctgttttgtaattgagtcatggtcccttgtcctagttagattattactatcacgatgtcatccctggattaataaagaccatatttgcttgcttcatttcttacagaacattatcagagtaaatcatcatggaatattgccttccagtctcacatagtaattcatacattaaatacaaagcccgtggccaagctcaaagcgcatacctgaaatgtttggactccatatccgtcaagtccttgaatccatccaagatagcctgagaggtgatgtcctccggggtttcatcactaccagccgcaaccgctgcagcatctctccttctattctccattttcatggatatgtatgtcgcacatgctagaacaatgatacccgcatagcaaatgagcaggcccagcagacccgagtaatagcgcggggcctcgtcggcgaagaagatgttcgctccggcgacattgccagccgcatatagcgagaaccaaagcccattggcgaccgcacgcttggtgtggccggccacattggtggcaagtaggttccacgagataataacgggggcaccaataatgtactgcagccaggtgcatccgactaaagtccaacggtggtcaaggctggtaaagcggatacccagaaggccaccgaaggggatcagagaaacgactgcaagcacgatgcagcgggaatctttaacgtaggtggcgatgataccgcagatgggaacgactacagcttcaatcgcgccggtgggtagttggaggagtgtagtgtagatcccgctgaagccatagcccttgatcaaggctgatgcgaaatttgatgagccgccgttgataacgccgcaggcaattccgactccggcgcagcagaggactctgaaatcgtagagaatctccagcgcctggcgtggtttgatctctcgggtcttcacgccgatcatgttttcggcgacacgctgcacggcaatcacgcgctgtcggtgggtcaggaagcgggcagagctgggcgagtcgggcatgagccagaggaagatacaggcagtgaggaagttgagtagtccgatggtcaagaagatcaactgccagctgcggagcgcggtgttgtgtgaatggccgaggccgaatcctagtagggcccctaccatcgtggccatgccgtttgcactgagccagacagccatgcgcaatggctgctcggagcgcttgtagaacattgatgtcaggttcatcactagacagaacaatgttagtccttttcgtgtctctggtttgtgccgtggtctactcactgcacggactgactccggcttctgccattcccaggaggaatcttagcaccaagattcctccgtagttcttcgctccgacgtgggcaataacgagcacactccagatcagaagcataccgcccatatattttgcgattggcaatcgttggattaggaggttggctgggagggcccagaagagataaccgaaattgaaaatcgccgcaacccatgaatatcgttggccttcaagaccgagatctgggatcaaagagtatgcggatgcataattaagtgatagtttgtctatatagcacgttagttatagaattaacaataggggaatgttcttgcataccgaggaattgaataacataggtcaggtagagctaaaaacacgatcaactgtcagaaacaacatcaaaatattatatcacagtcacaactcaccaccggcataaccctccagtcgagaatcctcagcacctcggcgccctcagtctccagttcctcggcagtcagctgctctgcctccagatacagattcgctccgatatcatgagtctcgccgagtgccacatgtgtgacatccttctccgcagtggagtggtcctcctttgtgtcgttggggttcattgtaagtggcgggggtcaagttgaacagaactgggccgtatatcaacgtccagcgctctattatataccccgcgtactttttcagccataacttgctatcaacgccaagcagataagcaatgttctttctttatctacaaagctatctttggtcaggtcgatcgttggagataggaagatgagcggccaatagtccgcatataaagtgtggggtaagcggactattctccgctgtacggggtcatatacttcgtcctgtctagatcactcgaaggcatcagacgaaaaggaaccatatcactcgcatttcaaactttcaaagcactcctcggcatgtctcaccaatcccaagacttatcgctcctggacgccagtatctcggagctccaatccgcactctcttcaggattgctctctagtgtgggcttagtatcacgatacctacaacgaatcagcgtctatgatgcaagtaatctaaagcttactgccattccgcttctaaacccagccgccctcgatgaagcagccgcgtccgatgcttggcgtgcagctggtctgccgccgcgaccgttggagggtatccccttcctcgcaaaagacagcattaaagtgaaggggatgaccgtggcgagcggctcacctgcatttgaaactctcgtcgccaacgaagatgctgcctgtatccaactcctccgcgaggctggcgccgtgcttctcggccggacgaacatgcccgccatggcgtacggtggtatgcaacgtgggtgttatgggcgcgctgaaagcccgtataatacagcatacctggctgcggcgtatgcatccggttcatcgaatggatcggcagtcgcgacgacggccaacttttgtgctttttctctaggcagcgagactgtttcttcgggtcgctcgccggcgtcaaataatgccgttgttgcatacacgccttcgaaaggccttcttcctctccgtggtgtctggccactctacttgacttgtgatgtcctagtaccgcacaccaggactatggcagatatgttccacgtcctagatgttctagccgtgtccgacaaagccccgacgggggatttctaccaggaacaaaaactcatctccctcccttcgatcgatacactccgaccacagtccttttcagaattgcaagacggcacatccttgcgcgggaagcggatcggtgtaccgtcaatgtacatcggaggcgataactgttctctatccccagccagcagagtcaacacccggccctccataatcaagctatggaaaaacgccagaaaggccctcgagtcctgtggcgcggaggtaatcgaaacggacttcccaattgtgacaacctacgagtcaaacgcagacaagggccagctcgtcaccgtcgcaggactaccagaaggatggtccgcgctggagcggagcgagctcgtcgcacatatctgggatgacttcctgatcaacaacggccaaaagggtctcgatagtctttctaaggtcgatccgacgacgatcttccctcttgcaccggggtctctgaagggtgcacccgatgcggccaatgcgctgcggtgggacgagatggttcaatacccgcaccggaggccggcgtctgttttcgatatccccggtattcagcagggaatccaggctcttgagaatgcgcgcaaggagacttttgaggactggatggatgggcttgggcttgatgctgttgttttcccagccaatggcgatatcggagctgctgatgcggactgcgatgaggcggcttcgctgtttgcgtggagtaatggcgtcaagtactcgaacgggaacaggcctattcgtcacctcggtgtccccactatctccgttcctatgggtctcatggaagatacggggatgccggtgaaccttaccttcgctggaaaggcatacgatgataacagtctgctcaagtatggcttttcttttgagatggcgatgaagggccgtgttaagccaccgcttgtgcctgctcttgactctgatctcatcaagggtggtcaagatcctcggccatgggcttctcgatcgaccgttgagttggtagtggagactcaagtgaagaagattcaggactccaccgttgtggttcaaatccagggatcagtggtacccaaggactctcaactggagactatggaatgccatatcaacggtcaagtgttcaagccggccatagagggcgatagatggtttatcatagcttcctaccctgcatcggaacgtgatcaaccctggaagaggtggtcgagtcctgctttgacacagactatcatagtcatcacagctcatacgaaggatggctcgacaacgggcaagttgatcctactatgaagacttagtgtcgtcaagaaatgtaactcttctttccattactccattatatagacctcctgaaataaattacaaagcgctcatatttacgacatctctctataatcttcctctaaaatgtcctgatgtatactcctcccatatatcatatcttcaatcatccccaagacagctcggtgtagataactcttcctcaactgctccaagtgcaattcagccacttccagtggtattgcagcactagaattagcttcaaatgtgccagaatcccacatgatcttctgtcgtacgaactccagcactttcatatatggcgttgcgtcgttccaccggtcgacaaagccagctagattggctgcacatgtagcaatggcctgctggttgttctctctgatacgctgttgatcccgaatatcagtgattggggttgtcgcccagacaatgtaaagcatcatgattcccgctcggaattggaatacaagctaatgatgattgatggttagtcaaaatcacatcgggtgtacctcgatcggaagaaaaagcagaatttcgacacatactgcagaccaggtaaagcacatcacatgtccttcttcttgcagcagccggaaattgagacagacctccgctatcgtcgcgaggatttcctctattccgtccatctcgatgagatcgcctttctcttctatcaggatcaagagactgtaaacatacagctttcgcatccatataggatggagatagccgtgttggtcactgtctaattcgtagtgtggaatctcttgtcgccatctatcgagagcggacttgaatgaggaggtataacctttaccatatctggcgaggggatttcggggtcggttctcccgcgttcttctgatgctggcttggatcttgcgtagtcggaacaagtgtcttatagcggggtttgtgcttagggttggttggagggtatctcccagagtgcacatctaagtagagaattagtgactgtgaaaagcttagaaagttgggaataactcacgtcatcgtcaacaaccctgtaggcagccgacactggtcggtcccaccctgaaacaatgacttcattgagcatgtagcaagtaatgaacatgttctcagacaaaacctcgctaaattcggtcatggatccattgtcgcggcatatcgatacgtgcttccggatctctgtcatggcagctgtacagaaaggtagcacggaagagacgctcgttatgatgtcctcggaagaaggagaatgcatagcatagagtatcatgaacagtgaagcttggatttgcaagaccatagacgaatgcccgacaacatatgggtaatatctcatagccgaggtatgatactcctttgaccgaacggagtgcgaagggtctcgttgtaaaacattgcaaagggatgcaccaatagcatacaccatctgcagaaagaaggctttccattcatcctgcccttccaggactgcctcggcatgccatgatttccaagctgtttcgttcaagaagggccattcgcggtgagtcacggagaaaaacacatttgtatagagctctttgagccaaggggcatcgtcatcagtcaaaggatacgagggtgccaggtcaatccaggggacgtcgaatgtcgtctccgggaataaagagaacgcgtcaggcgagaaagatgatggatattttcgcggtgatctttcgctgctgtgttgcaagtctggcagaagcataaaagagccgtcattctccccgctactattctgctcggccatcaggtagtccgagtcattgcctgtattactgcgcttgtgttctgggtcttcaaaatccgtctggactccagcatcacatgtttcgaccgtggtctctataacgctagactcatgatccagctctgcgacccgttgctcgagttgtttcaagtattccagcgggattgtgatgttatctcccatcttccgagaccgagccggcaagcattcagcgcccttgcgacggcattcgccacatgaaggttttgcatgatcacatttccgcttgtgacggaaacagcgatcgcatgctatttctctgtgcttgagagggcgcgacatgcagcaattgttggacacatacagggagtgagagggaatgcggggagactcgcgataacggatccgcgccggtgcgatatcagtcctttaataagttgctgcagaaggaaggtctaggcgatgataagaaatgtttggttgattatatatcctgcttgtgttaagtataacattgtaagagatctgtcaagtcaggtcaactggaaataaagtccatggataacattcatattcgtcccatacccgcgctcactgtcagtcgacagcgacaatcagattttgatccatctttgagccttggtatcatatccgatcaacttaggatcaacatgtagactcttgagcatgaactccattgtgaactcctgggtaacaatgtcagcgcatagattccacccaaaaccacagtaatatcacaatacgtacttgatcctggctctcctcatcatccttcttcagtggccagccagaagaatcctcagtcccgtagttatcaacgtctccctcgtcctcatcgacgtcctcccgctcacgattctccccatcaaactccttccaccgtgtcgtatcacgcttcgaccgctctttccaagccgccatccctcccatcccatcaaacctttccttggcaccgacaaatacctcatcggctgcgtcctggctggcgagccgccatttggtgatgagagttggaatctcgatgtatctgggattcgtctcgaggttgtgggcctgatttgctgtttcaagtttggtgatgagtgcatcgacctttgactggatctcgcggtgctgcttttgcagttctagaatctctgggtcggtgctttggaatgattgtaaagggaatgaggaagagattcgtaccacgcgcttgcgcttagggggtactagagttgttgctagatctggtgaatttgatgttgagttggactttacagtgagggtaggagtcgccagaatttgcgtgtcctcgagtgcgacaggcttcgatggcatgtcgtctatctttgttggtgcaggtctgcgtagcggggacttgaacggctttgagagagcggtagctgcgtcgatgcgacgacgtttaatagacggcttgtccatgatgcatcaattggatacagacctcggaatttcgatgtgtttaacgaggagaaagaaacatagaaaagttggagaagccgagtgagatgcggagatgcgatattcttatcgataagcaaacagactatttatctacaattctagaactcctcaatgaccaactcctcctgctacccattgcccaaagtcaggttcaccaggctgagggaataatccacggtcgttggcattcccatctccattcggggcattggcgttagcgttggcattggcgttctggttctgtcggttgcgctgctgctgctgacggtagtataccaaaaccaacagcgcagcagccagtccgacaatgaggagaccctcgagcattccctcgtcgatatcaaggtccaggtcatcatagtagccatcttcgtggccttcggattccaagccacgatattcatcatcatcaccccgttgtagttcataaaggtcttcgtaatagccatcctcgtcgttctcgatgaaagccttgacccattccttgaaggtacgacggggcttcgagtctagtgataaacgtaagtaagaaactagaacgcgattaatttcacggggtaagagcgaaggagcagcttaccttcctcctcatggatggggttaatgtctccgttagtgatgcgattccagtatcctcgagcccggagtttgatcaagctgagcttcactggcagatacgcttcggggctgaggtcaagagccaaatcataatatcgcttggccatgtggaaatcctgatctactgccacgccattctcatgcatccatcccaaattccagtagccctgggcactgtggtgggcttcagcagcattgtggtaacaggtcgaggccttgtcggcatcgataggtgtaccagtaccagacaggtagtagtcacccatcttgaccaaagagtcgatgttggcttgcttcgaagagcgggtccaataaatcaaggccagtcgcgcattgcgcatcaaggaggatcgagccttctcagcccatggaaggatggaatttagtgagagtacggagcgatgctcatcaagcagataagccacatttgcctgtgcgttctcatagccttgctcggctgccatcattgacggaatgagagcgccctccttatcaccggtttcgtaagcagcgtttgcctccacgaaagctgagtggacgatctctgctttttcggcaaccattttatagtaggcagcggccacaccacagtgacgctgtctgccaataccgaagttggccatctcagctagataatagtacgcctccatccagccccagcgggcggcaagctcgaagtaacgtgttgcggttgccacatctccttggtccaagaacagagcgcctaatcgtgattctgacgcaggggaatcctgctctgccgctgctttgaagtagtgagatgccttgaaggcatcctgcggaataccatagcccttgagatacatcagacccatccaatgctggcacatcgggtccccgttcgtaatacccctccggaaccatgtgagggcagtcgggaagtgttgcttaacaccctctccgcgaaggtacatcaggccaatatgtcctgcggccttggatgccagtttatcaagccctgcaggggggtttgagttgacggacccatccttgttccaatatttcttggtaacaaccttgaaatgcttcatagccagtcggaaattccgcggcaagccccgggcgccctcgaagttcatcttaccgagggtgtatgtagccttcagttcacccttccgggacatgagatccaagtattctagtatatcttccacgctggcctcaggagaggcattggcagcgtcccgcgcattttgacccgagctcgacacactggctcctggaccgtagacaccaccttcttcgtctgcccaacgataagattctcgaaccatagacctaccacccggagggcctgagcggtagtactcgaccgccttgtccgcaaccttcttgtagtaatggatcgcatggtcacaatccttcggcgttccgataccagtgtggtagcgatacgcaagtgtcatctccgagcgaatgttccctgtttccgctgcaaattcgtggtacatcagggcctttgcctggtcgggttcgaccgcaccgccgatgcccgtcgcatacatgaacccgaccatgttctgcgctgtgttgtttccgtccaaccatgctagttcgtggtaccagcggaaggcctctttgaaatcgcggggatgggagaagttgccatagaagttcatctctgctaacaagaacatagcatccgggtctcggtcttcgtctgcagctattctcagctcctccactgctcccgtcagatgtttgtttattttctgctcgggtttttcagtcgaagggcggttcaagaatagcagtcggaccgtttgacggccatagtatgtgaccgtccctagtaatcctctcgacttgtcggattgaaggactggattctttattgtgcgaagggtattccaggcattctcgactcgttctatcatcacgatgaaggcaatcagtatcaagcgtcaggcgataaggcacaagtcgtctctactcacgagtcataggtcggggttctgcttcccctgccaggaacgtaaattcgtggtctgcatcgcggcccgttgccgcggacgctgtttggtcagtaagcggctgaccaggcccagctgcgcatgtctgcaatagcactgaaaaggggtgtcagtttccgatgcgggcctgcaggtgcgggcaaatcttacgcagggccgagagaaagtgtgaaagcggcgtcctcataatgcctgcaaaatcctgatgtagtgttggagtgtgaagcacattgcgactctcagagcaatgagaatcacaaaagcgacagagctggggatcgtgatatgatgtagttgcagagtacgggccacttggcttgacggagcttcattttgccgagggccaatcactacatcgtacctgtgtagctttctacgtgcatgcatattttctatatgtaagatgttatatgttccgagattctgcttgtctatctcgtttaacatgttctccaattcgtatgtagctttccttagcctagactttagactatctataaaagcggtgagaatatataagctgccgaagtagagacatcttgttctctactgcatacgaattatagggaaaagattggaaatttcataagcattgttggaatctactcgtccctctggagggtgtgtacaaacgaagagaagtcaaaatacatccccggtgcgctttccatgcaataaaaaggagtcgggcaattccccaatggcaatcaaagtccgcacccctatctcacagcatccatggacagtgtcctcgattctgatcgaaggttgtgcggtcttcgcattcgcgatgggggaatagtgcgccgggaaaacaaagcaatctcagaacgatggcggctgaaaccaaactggcacgtgttgttggttaattggttaaaaaaaagactaaagaggtacaatgaatgggagacaatccccgatatcgtgaaaaaaattatcaaatcatttccgagatttgtagcgcgaaaagatcttttttgtttaatggttgagcttcaagttgatgatggtacagatgtggaacacgagcctgagacaggcaagccatcttcgtaccatattcactgacgcggcgacgttgggctgtacgccggggatgtcgggctatacgccggagaggtaggtgacgtcggagaaccagagaaattgggagaagtcggcgagtatgactgggggctcgtaggagaccaaccaggcgaggttggagtgtacttgggagaagtgggagacgttggagacaggtgccgagcaccaccaatcgcgggactagtaggactgtagctcggcgaagtcggactgaatgccggggaggccggactaaagctgggggaagtcggactgtagttaggcgacgtcggcgagaacccaggcgaggttggagagtatgaaggagaggtgggtgacgcttggccgtatgcaggcgaggtcggcgagtagatcggagacgtgggttggaacgttgggctagaagacgagaacccaggagaggtcatcatcatccgcgggcttgtcatggagatgccaggagacgtcggcgagtagctcgaggacggagagtacataggagacgtcgggctagtattgaagggactcgtcggcgagtagctgctcgggctgcgaggcccaggactgaacgcactgaaggtactggagctagcctggtactcggtgagacctccagtaggctcctggccaatttggtgcataggcgagaacgccggatcgggatcgctaccggccatgtacggggagctggccataggagaaccagtatcgtactgagtggcagcaccgtcggaaatgatggcatccttcgcgccgaccgcacccatcagaccatagcgtgcattgttggacacgacggtgttgagcaagttctggtccaggtagacgtcgaactcacccgttccggcaggggccatctgtccaaggatcaagttctcagacacaccgcggcaatcgtcgagctctccgaaagcagcagcctcgagcagaatctcaactgtctcttcgaacgaacaacgcatgagggcaccattgtcggcacggttgataccatgacgggtaacgggagtcagataaccacgaacagtcatgacatcgaccagcagagccaagtgacggtgattaacgtaagaaccgtcaaaggcaagcaccagggtcaattcgcgaagcacagctgtacgggcagcctcaataccgaagacttcgaaaatctcaataaactggttagagtaggtgcgggaggcgtcaacgcccggaatcgaaaggacagcagccaaagacgatccactggtttccaaaacccattccttgcagagaggatcggacttgctggtgtggagtgaaccgtcttcgatgactctgaccttgctcttctcattgatgaaagcacggtcaacgccgggaacacctcgaagggtcaaagtgtccagcaggtgttgctcaagcttcttcaaggtgacgtcgtactcaacgtcttcatcatcgtcctccttgtagtcttggacttgacggatacgaataacctgctcgtctgcgttgttatcactgaagatgacagcaatatcacgaggataagcctgcttgattctggtagcaacgtcctgcaccgtgagacccttgtcaagaagagagcgacgactgagaacaatacggagcaaccacctcgactgctgagatgcgtcgtcggcattgtcttcgggaatgatgaagtacgactccaccatatccctatcgttctcaatgacagtggactgaatatcgggatcatagtaaatctccgtcgactcggtcacagaccgcagactagtatgttccacgagacttcgaaggagtttggcgccctccttatcgtgggtcttcataccctcttggtacacagtcatagatggcgtcttgatgtttgtggcaacgttgagaatttccttcagacggggaacaccaagcgtgacgttcttagatgacacaccagcaaagtggaaagtgttcagtgtcatttgcgtcgcaggctcaccgatagactgagcggcaagaacgccgaccatttcaccagggttggctgccgcacgaaggaaacgactttcaatggcacccagtacgtgttggaatgctagcttgttaagcgaatagtctgtgacaagtcggcggaaagcgagacgactgcggagttgcgccttgaacagcaaggtcgcattgacctgagcctcctgtgaaatgggatcgtcaccacgaacgaccaccaagcgttccaggagctgctgaacttggggaatgacctcagcggggtgcaaatcactgattgtgccctcgcgaatacggaaagtagttcgggccatttccaggatacgctggatattaataggaagctgcatcatctcctcgtcctctttgaccacagaccgcaggaattcacggtctttcagaatggcctcccattcttcgtcgaagtatttctgtacctcgatatcgccggcaatttcgttggcttgctctaagatctctgggccgagggttcgctcggggtccataacatcaacacggaatcgctccctgagcttcgcgtcggaacacttgatgtgatccacacgctggttctcaatgtgggcaccgtcgagaccatcctctccgtagatgaactggatgatatctccgagggagtttcgcacagtgccatcatatttgaccatgacttcctcaagagccttgaccagcttacgctggatgtaaccggtttcggcagtcttgacggcagtatcgatcagaccttcacgaccagccatggcgtggaagaagaactcggtaggagtcaagccacggaggtatgagttctcgacgaatccacgggactcgggagagtaatcgtccttggtgaagtgaggaagtgtacgatacttgaagccgaacggaatacgcttgccttccacggactgctgtccaacaagggcagtcatctgggaaatattaattgccgaacccttagaaccagaccgcgccatttgaatagcgttgttcagatccttgagactcctttcggtggcatcaccggcttcgtcacgagcattgttaagagcacgagaaaccttgctctcgaatgtctcacgcacattcataccaggaagggcctccaaagtgttctcggtggcactagccgtaatctcctcgacttcctgtttcctgtttcggacggcctcctcgatctttttgatggtattttgatcgggaatggtgtcaccgataccgatactgaaaccatggtgcagcaaccagtaaccaacgatggtttgggcgccagtgaagaatttcacacaagtgtcaggaccgtactcgttgaaaatggtgtgaatgacaccaccaccactggcaccgaccgtcttcttcgaaagcataccatacatcagctgtccaccgtgaatcaagagacctccatcattgagagggctgaacttctcaactaaaggcgagccgtctttgtcaacacgcagaaggttgagtccggaggggaaagccatgctaatgatctgctttccagtccagcgaggacgaggcttgatgattgccggaggtggaatcgcaccatcccagtcagggacccacagcatgaggttcataacttgttccttggtgaggaaggtgtcacgacggcagatcttgtaaataccgcagagggtatcctggacaatacccatcagaggaccgttacgttgcggggaaacaatattcttcgggaccaaagcgagctcggcgagctcagcgcgcgcctcttcgccctgggggacgtgcaaattcatctcatcaccatcgaaatcagcgttgtagggactggtaacggacaggttcattcggaatgtggagaagggcataacgcggacgcggtgacccatcatggattccttgtgcaaagacggctgacggttgaacagaatgtaatcgccattgtcaagatggcgctcgaccttccagccatacagcagttgctgggcacccgcacgcttagcgtgacgaagatcaatgcgctcaccgttgtcgcgaacaatatatcgggcaccagggtgcacgttgggtccatttgcaaccaatctctggagcttttcaatattgtagggggtaacaacttctgggtaagtgagaatacgagcagtcgagtatgggacaccgacttcatccagtctcaagttggggtcacctgtgatgacggtacgcgcggagaagtcgacacgctttcccatcaaattctgacgcaaacgaccctctttacccttcaaacgactgcgaagagccttcaccggacggtttcctttctgcatcgccgtgggctggccggcaatgtcattatccatgtaagtggcgatgtggtactgaaggagagattcgaattcacgaatgacatgctcgggtgctccctcctgctcacagcgttgaacgttttggtttgcacgaacgatttcggcgagcttgtaagtcagatcatcctcaccgcgagcgccacttgtggttcccatcacaacgctagggcggacggtcgggggaggaacgggcaagacagtaaggatcatccactcgggacgagcgtagtcattgctgaggcccatgatgcggacgtcttccacggagatgtttcggaagatgttcaatgccatggtaggcgtaatgactttcttttccggttgagccatctcatcctccatcatagccttgctaggcttccatgttccaaccaaacagattccttccttccgaactgtgggctgggcattaccgcagccaccgtgggagcggcccttttgggggtccttcgaaaattcgtcatcatcagcaggcgcgtccgcttcacataccaggacatccttggagagtcgccagatagaatcaaagcgtcgcttgggatcacggaaacggagggcttctgtaaactttgaatcggcctggtatccatgttagcgaagtgaaccagtcaagatttgccatcccaatagggatgactaaccgtgttggccttgatctttccacagttgtggcaaactgtctccaacagcttcttgattttcgtcaaaaaacctacaggggtgccaagagtcagtatgggctgaaaagacgaaaaggaggaacctgagaaatctgttacgcaccgatatggaacaccggggacgcaagctcaatgtggccgaagtgcccagggcattctttcgggccctcttcgcaagtctcgcagttgtattgacggtcgattgtacccaggcgagggtcattgatgcccttggtccgaggccgtaaacgttgatcatcctatgaatacttagcaatcaagtcaccatagcgcataggagagggaagtctcgtcggaaaacaatgcagtcgccggtaagaaaaatgtaggagtcactcaccagtgtttcgggatattcaatgtgacacacactcatgcgcttgatctcttcgggagcaaagagaccaaactgaatttccttgatggtgcgcaaaggcgccttggaataagggaaaaacacgttcgacatgatggcgaagttgcggtgacagaaaaagtggatgaaaaaaggcggagatgaaccagtcacgtaggcgtgtcgtaaaaccggtatcagcgacgaaagccggctcgtaaatgtcgcaaaaaatgaagcgaaaggcttgctcgtaagctagaagtcgaatttacacgtagcgacgatgaaaagaaggtggtgtggaagcagctggccggctgaggccttgggcagcccttgccacgagggcgccggcgacctataggtcccgaacgtcacggagcaaaaaagaaggagaaaaagagcgctgcaaagaagatcgtctttacagtatcttgaagaagtctcgcgatgagaatgcgcgatcctcctggattgtaaaggcggtgggtggatggagtgtcggggagatgaaagggtgatgttctgaggtcgcctcactgggatggggcttgagttttccctgcacgatggttgccgtctaaacggggctcaccgctttggcagaactcggggcaccttcccaaaaggtcggcaacggcagattgactgcgccttccactatggtgaatgaaagcggtgaatggcctaggcatcaatagtaggcatcaatgagggtgggttatagatggcttattgtcaccgcccgcatcttccagattctatggctatcgacaccggcagaaggaccatgcttattatcactacgcctttcaccatattctggagttcacactggatgcttgaacaccagttcttatcctggcctttctgataggctgaggattcacctcgaattcaaatattcatctcaatctacacgcacctagcacacctagcgcaatgaatctttcactggtcgatccatttgtcctggcgcaggaataccctgataccttgacggagaagctgagtatgtgcgactcatacttctagcaatgaacatcactgactgagccaacatgatataggcagcggccatgcgacatgtttaagcttcaaccacaaaggcgactaccttgcctccggacgagttcgtgaaccccaaaccaaagaatatagcaacctgaagactaatacatgctctaggtagatggcacagtggtgatcttcgatatcgaaactaatggcgtggcgcgcaagttgcaaggccacacgcgacagattcagtctctgaggtataatttccccagattcgacaccgatcgaccgaaacccaaaatgctaactccattcccagctggtctcgcgatggtcgctacctcctcacctcctcccaagactggaaatgtatcctctgggatctcaaagacggctcacgagtccgcacagtccgatttgaagcgccagtatatatcgccgaattacacccattcaaccagtacggcttctacaattcccggatatttcaacaactaactttttctgtctcagcctcctcttcgtcgcctccctcttcgaagaccagccagtactggtagacgtctccagcacaaaaccaatcaaacgaatcctcccctccgcccccctccgaccgcaagccccagacggcgaagaactcgacccggccgtagcggccaaacaagcagcgcaagacgccaagcactcaacatgcgtaactatcttcacggcctttggcaaccacataatagccggcacctcaaaaggctggatcaacataatcgaaacgcaaacctgcacgacaatccactcaatgcgcctctgcaacggggtcgtaatcctcctccggctagccagcaacggacgcgacctcctcgtcaacagctccgaccgagtaatccgcacagtgctgatgccagacctatcacaactggggatcgacctggaaccatccgcgataaaactgcacgtggagcacaagttccaagacgtggtcaaccgactcagctggaaccacgtaacattttcatcgacaggcgagttcgtcactgcgaccacattcatgaacccagatatctacgtgtgggaacgcagacacgggtcgctagtcaagatactggaagggccgcgggaggaactcggcgtcgtggagtggcacccgagccgaccgatggttgtggcgtgcgggctggagaccgggtgcatctacacgtggtcgatcgtgtcgccgcagaaatggtcggcgctggcgccggatttcggcgaggtcgaggagaacgtggagtacatggaggcggaggatgaatttgacgttcacccggccgagcaggtgcatcaacgacggctggatcaggaggatgaagagccggatgctatgacgcttgattcggcggagggggacgctgatggcgttgagccgtttaacctacctgtcttgctggatatcgaggacagtgattccggtgatgatgtcgttgctgttgggccgggcactatgcggcggaggacgcctgggactagtaaggagggtgccaatggggattcggagaagcctgcggctaatggggcttctaagggtactaccaggagtcggcggcgatagttccttttttgtgtgtctcacttttctttttcccttgcctccgctgttggatggctgtactagcatggttcgcatacggcggcgttcatttcttagggcggagatgactgggcgttgggcttctggttttttttttttcttttggttcttactgtagccaatgaatgtatgacaatgcagccatatcatgatgattaaaaggtctaggtgctactattttaaacagagctgtatttgtatatcttttaagaccggagagagcaataactaatagaaactgccttgacaacataactagctaatggaatctacagctatcaagtacagaaatagagagaaagataagaatacgaagagcgtgttgattccaaagagacatatcgactcatcatttaggtagcaaatggaagtgtcagaaactataggaaggtaataatctgggtatatatatcacaagccgagaagattcgaaatcgaaatcgaaatcgaaatcctggctaaagccgaaaacgccatagatgcaaagtccagcatgcagagaaagagaaaaaaagacacaagagaaataaagggtagagtgagtagagtatagtagaatagaaagaaaaagagactcgagggagccgtgggtgcatagaaagaaaagaaaggaataaaggaagaagaataatcacatacacatcgtgtcagccgtcaatcgcgcaaacacccttgagaagtcagttaaacaatgttcatagtcctgtcggctgttgcgggtggaatctataagggcaacactcttcggggataatatgtctgttctgaacaaaatcataaagctgtgctgaaagtcgttggctccggagcgaacatctagttgcagccccttgcagcagatgcacgttcaacataacgtggcaagtgcatactctgggccagccaaagtctgtgagcggcgacccggtctattttgaattcgatcaaaagcgagtgtagttctcggacaaagccagcactgtcgagatcacctccgatttgaagtactagctacccttcgaccatcatgtgggtaggatccggcttattcctcgacaggttttcgcgcttggtaaatgtgcagaagattgtatgttttgatcttcttgtcgaacgcttcctgcttgacatcgaatgcaatgcggtcaatctgctccctagaccaagaaagaacccgactgaaaggagccaaacacatcggctggacgctctcggagatagcgagattgtaccagcgcgcaaccttctgctcgtgcgaatcggggtgccatgggttcataggcaaccccacgatctggtggtcgatctcggtgaagcccgcttcttgtaaattccggatcgtctcgttcgagctgtgggccaggggccgcatggtagcttccgttgcatgcttcaagatcgagtaccagctagccatagcacgtcccggttcaccatctttgtcctcaacgcggggccggaaatcgatctcgacctgctcaaaccaggcgcccggccggagatgctggaagacccgtcggtagagacttggccaatttgcgacactcccacatcccatctgcatgtggatgatgtcccatgaatcctcgcccatggtccagggcgcttcgaagtcgaacggggcgtagaaatcgcagttctttgggacattggtcggttgtattggcgcaaggtcaacaccgactacgaaggaattcgggtatttgttcgcaatctcgatgctccagatacccgttccacagcccaggtcgaggatcttggacccggtggggtgtggtgcatagagcaagccatcctcggcccgtgcaacggtgaacaatttgtggaatatgtcgagacggtcctgttcttcctcgtcgcacgggagagggtagattcctttccggtagccatggtataaccggccgttctctttgtgaagcgggtatttctcgggtatcctgtgagaagaggtcagtcatagattacacgattgagcatggagtgacatacttgtgatcggagattatgataggagacgatcgcgacacttgagatgcgttcgaggcgtgggatgcctgtgtggccaccgatccattgctagcaaagcgagcgttcctgcgcggatctttatcgaccggatctctgtcgatcaaggtgtacaagtccatcgcggaagacggttgtcgtgatcggactcgatcacttcctgccaaggagtgtgaatagtatctggagtggcctgcatcactcgccgaggttgactcggacttgtaccgtttgggcgggggtggagaatgtatgggaggcaggtgtcgcagcctggcatccccgttcgtaaacattctggcgatgtggggtcagactgtaaggcaatgtgttgctatcggcgatcaatcaatgatggcgcaagatatgtaaggcggtttcagatcgacggatcatgccaggtataaaaataaacaagaataaaagagcaaatcagctgcgcgcggcgaaaagcgcagcgtaagcccacgagcaaatgatgagctcgggttaaacgagaggttccggccgattgcacggtcgggcgaagctcagagattcgagattcccaggaaccgagcacaaatcacaggtcgatgtgcagtctcagatcaggtccaactctatttcctgcaagtcctcagaaagagaagggaagaggagggttttaaggttgtgaagctgtggtttccttcccgtcgggcccacggggatagcggggtgcgggtaaagcgagagaataaaaagaagcagacagggatgaggatagatgaaggggaatgagaagaacttgcagaacttgcagaagtacaaagggaaaagtacgacccgcgctaccggtactggctgttgggttgggtacgggcgtttaaaggatttgttcatgaatagttaggtattgacaattcattattgtacgaaataactatacggataactactagtaatcatattatattacctacctacaacatacaccacaactacaacatatgtagaccttatgcaaggcatcccagagcaatggttgaaggaaggctaaaccaattagggcttggttgatcctggtatagtcttttgctctacttttgcttcttccagttttgcttttgctttctttgcttttgcttcagtatacataattcaactcctcatattcgataccgtaccctccgtacactccgtacccccgtaagagctagatcgacgtggaccaaaaggcgacccacgccctagcgggatgcggaccgtctgggcctctcatttccagggattccacttggtgagggcccaacggagtggtaaaaggcgtcgagttacttatttggtaacttagggtaagcgtggcgctgttacttgctgtactgtattctggtatactatactaggtacactatgtactactacatatgtatcaatatctacatctctgtgccacctcaatacaacatatacctatgccctccgactcgtcatacaagtcatcttaaaagaaccaactcgtacaacgtctgcatggactgatgaatctcccctcaccgcaacccaaagccctgggttcgtggatgccacagtcgagcgaatcaagtgagataccacctcttggcagtaagctgcacctcggggtaatccatggatttattcgtttgtgatatgtaagaatgaccccaagaccactgcactgggtcctgactcgtgtcaagtctgttgtttgatttcctcccaaccctgcaatctatatacatcccctactgatatctgcgttctacgtgtcaacattcccatcaaaacgatagcccaagatgtttcccctttagaccattggcttcccaggccaccggttccaccctggcccgagcgcggatttccgttactactccgtactaataaaacatctcccggccattgttggggatctaccgagtactagccctcttcataggttcctccgtacacagaaatcatcctagcgccggtcaaaccccgagcgcggtgctctccttgcagggtacatcctctgtacgggaatatttcagagtccgtgctgatctttcctgtcattgttcaccagctcgtcatggaggattgatcgaccggcctgcgcaacccacacgcttgggactgacagaccatgggattgggcttcgcaggagtagtgcattgtctcggggggactaacatctagcgtatggagtacgtactttttttgcccctgatttttgaataggagatctttttatttcgtttcacaaagaaagccaaaggattattcttcattctatcgctatattttatattgagtacatgtatgtacatatgtacctagacagattaactagtgaattactccggactccgtaagaactacaggatgtacatcgatgtgatcgtactccgacagatattggccccacgtcccgccagaaaaaaaattctagccaaactccgaacctcatccaaacgaattgattaaatttccacgctaataatacataaaaccaaaaaccagtacacagcacatccatcctcggagataatcgatcactcggaaactaatcgctgcccctcgcatcagccacagcgggatcaccgatcaccccagagatcaaaacatttctatatcaaacccaaaaaatccagccacactgcagacaccgggactagcagctccccgggaattcaacaatgcacaccctcaaagcagtcgcctcgtcgactctgtcgctgccggcggacaattacatctactccatcgtgccttcggcgccggggacattcgccgccatctcgtcagatgattcgctgcgcatgtttgacgccgccgatctcgatcgcgggtccgtggtctcggctgctagtcacagcggcggcgtgaccgcgctgcgcagcttcgccatgggtgagtcgcacctcttggctacgggtggccgcgatgggaaggtgaaagtttgggatgttcgggctgggaatggcagtccggttgtggagatggaaacgggtgagtttgttccagttaagctttttttttattgttttcttttttggattttatgcattgattgcctctttgggttgtcttcgggaacctgctggcacatgtgcgttttgtgttttggtgctgcatttccgctggtcttttactgggtttcggggaatttttcggcgcttgggtgcaagggtggcgatggcttggttggggttgttgctgctttctgattaaatgcttatttgctaatacattgtcttatatgttagcgaaaaagtcgccggttctgtctgtcgcttgtaacccggagacgaacactattgttgcggggacggaacttgtctcttcgcaggcggttgttgcattctggtatgtttcatctatacctcatttttatttcttaggcccagttttatcatcgataattgcatcgggatatgtcagacaaaaacagctgtgccagacccactaactcacacagggatatccgctccccccaagaattccgcctccaatacgtggagagccacaacgacgatatcaccgaggtaagtgcacctccattaagaatcaagattttaagcccaacccaacatacccaacacctactccaaaccccacatgcagcaccagccagactaaccattacatcggcatcttgcctgttaccgatggtacacagctccaatatcacccgacgcgcagcagcatcttactctccggcagcacggacggcctagtcaacatctacgatacgaccataaccgacgaagacgaagccctagtgcaagtgatcaaccacggctccgtacatcatgccggcttcctgtccgagcgcaccatcttcgctctcagccacgacgagcacttctccgtgtacccagccacggacccagacgatgcctcgcaggagcccgagcccgtgcatttcggtgacgtgcgcgacccgctaggctgcgagtatgttgcgcagctgtgtttcggtgcgcagggaccgtatattgccgctgggaacaagatgtatgtttatttcttgttttgttttgttttggggtttttttgtattcgtgctcggaagacgaagtcggacaggcacacgtgctgttgtgtttggggtttcgtgggctgggctcgtgggtgtttggatttgctaactatgtcttgcagtgacaaccgtctcgatcttgtcccacttatttccagcccgtcgtggaagctagaccgggataatctgtggcgcttgccccgtgctcattgcgaggaggttgtacgctcggtgtatttggatgaacaggtaagttttctaatactaattttcttgttgtgtgttatatctgttggcctgttcttggctttcgttctttataaccctcgctaatgcaattatatcctctagagtcagtccgttttcacctgtggtgaagatggcttcgtgcgagcatggagacctgcagaagagagcgatgctccagtccagtctggttctgcaaaggctcgcccgaaggagaagaagaaggataggttcaagccgtactagtctgtgtactgtgtgcgggtgaatgcatctgctgctgacggttgtctgttgtgtatcgttgggtgtttggggtgggtaaaaatagatctgcaatttgatgatatgagttatgtctttattgtggaattgctgtgcgtagaaaaagttggttgttgggttagtagtctacatgtggtaggttgagatatattactggaccatgacctctgttagggtataatgttgaattgaaccacgtccattccgagcaccaatgagcatgatttatatggttttagctctggttctttttctaaatcacaaatcacaaaaaagaaaccaactttgaattgaagaaaatgccaaaaaggcgcccaggattaagctctatcgaattgtgaacgagattcataattagtaagcataaataaacagtcaatttatccctacacaacctgacccttcaggtgtcgaatcttatctccaacatttttttccgtatcaaaacttttcttgcacaagggaccaacaaccataaatcccctctcctccaattccacaacatacatacatacccaagtcagaatctcacacccaaaaccaaaaaccaaaccaaccttcaaacccattacccacccaaaccctccatccagagcaaacacaagaaccaccaccacaaaatggacgcccaagcctacctaatcaagcacggctggtccggtcccggaaacccgttaaacccaaacaaacgacccggcgcacacagcggcctaggtctaacccgaccactgctcgtctcgcgcaaaaccaacaaccacggcgtgggcaagaagacaaccaaagacccgacgaaccagtggtggctgcgcgggttcgaagacgcgctgaagggcgtcgggaacgacagttttgaggcgacctctgcgcgcgagaacaatgcgctgacgagcgagctttatcggcattttgtgaggggggatgggctggctgggacgcttgaggggaagaaagacgagagcgcgtctacgtctacgtctacgtctacgtctgcctcttcctctaagtcaaagcgcaagcgggaaaatgaagacgagggcgagcgcaaggctaggaaactggccaaggctgcgcggaaggtggagaaggcgcagaggaaggaggcgaggcgtgtgaagagggctgcgaaggcggagcggaaggagaagaagattgctgggaagctcgcgaagaaggctttgaaggagaagaagcggactacttctgaggaggattacccaacgcctaggtctattgatcaggaatctgatctgactggggcggagactacggggacggatgaagctgttgcgcagttagaggagaaggcgacgaaaaaggaaaagaaggagagcaagaagactaagagcataggagataatgggggcgctgaagactcgaaaaagaagtctaaaaaggagaagaaggataagaaggaagctaaggcttgatgtgtccatttcgttgtacgcattttgatattgagcgcttcacatgcatgtcaggaccaggtacaaaattctgcatatacctgtttttctcttacgcctagaaatcaagataccctttttgtttggcgaaatcttgactattgcaaccataggaaatgtagaggtcttttgatttgtgttggagctaagctacgctggtaattttccaggagtacctgatagaatccacggtcgtttctcccagaactcatctttgatgatgtcgacatggtcaaccacgacctgtgctttccggcgcagtttgcggatcttgtcttgctgtgaccttgactgcttagactcgaccaccggtgattcttcgcccgcaggtgattttgtaggctttggttcctccaactcgtactgtagagaaatattagaacggccgaaacagaaagaaacacatataaactaggacatacctggcgataaagaacagtgccctttttatagatctctagctcgttattgtagttaattccaaaccgcttgaagagaatctcgttcttgtcggcggatacagtaccctggtatcaagtcaattgcctgtaattcgaactgaaagaacaatagcatacctttagctcttgctcggcgtctgtattgctcattccaccttgcaacaccattgtccagaaggtagtgttgtagaggttattgatgtgacctagtgatattgagttagccggatgtagtccgaaaagggaattgggagccacttacaatcaacctgtctccagctcatatagtcgcggagaatttggttattcgggtagatgaccgcacgcccatcgaaagagggtagatacggtggcaggagaggtctttcggggaagaactcgctccatttgtaaatgtagtgtgctgtgaatgtagagacgatggtggtaactagtttcctggatggaagaggttctatcaatggccgttcttataccactgagatataagcaaagaagaaatactcacccattacgccgctcaaaaagttggcaattgggatgaaagacaaaactgaaggaagactgttagttaatgcaaggatagcgatgaaacgagctggacatacctgaattcgtcactgactccataggcgatacataggtctggaagctctttcatgacctcaactgccgcagcattcatcagatccagtgcccggcggtcattgggtttcgcgaaagcgtagtgatcagagagtctatataggttagactccgaacagaaacgagagcatgaactagaacagcagtcatagcatcatatcttggtgagatatacgcatagaagacggatatatagttgccattttcttcttctatgaagattcctcatgcaaagggcattcccaaataacaagacatggagactcacttgtgaaatcctcgtccatcaatgcggaccacaatccacgtactggggagcagcacgtccggctgctcaaaggacttgacgtactcaaatctgtgttcatttagtagccggactgaaattttctagaatttccagtgcttacctagaatttgccattttaatctactggactttgatgttaagtgatgaatgtccagagattgaaagtgtcattttgtgcgatttctgcccgcccgcatttgccccaactcgaaggttttagaatttgaggacttgaagtgatttgattaggataatgcaataatttcttgtgaagaccagatatactacaatttctagatacatccagatgactatgtaaaatcaaaaatccgcaaataaaactaatatgttgttgagatgcatatcaaaaaccttcagggaggatgcttaagaatctaggaaatgaaagtgaaaggacaaaccaagatggtctatagataatgtgagatacatgtgagaatcatgaattctcaatctctggaatctcttcatcgccagcttcactggctcgctcgctagtctcgctggccttgtcagacttgcgagacttacgagaaaagaatcccaagctgctgcgggttgagcgatcggcggaggtcacacttgagacagtgctatcgacactcttgccgagctgcgcttcgctggtggcatcctcgtcaatatcaccttgcgaggattcacctttcttagagaaaagtcccgagcgatccttccaggagctgaacttgccggaactacccttgcgcgtgatcttgcgaatgaacgactccttggaggcattgtccaaggaagtagcagatggcatgcgctccaacgattcataggaatcgccagtgaaaagggatacggagcgagatgtgcgagactccgaaggagatccatcgaaatcgtgaagaccaaagggactttcgggatcattgcccttgtctgtgtctatttccgacttctcgcccgtgagaacggccgtgaatgccggagcagcaggattcagctttggggtcagcggtcgatgagaagacgacggacgagtgccaatcggtgcctggagcggtcgatgatgacggtcaaatgtgtcccccacgaaatcaggctcgccggttagaccgagaggaaggtgtccggacgatccatactggattgaaggtcggcgagaaggagctcgagaccaattggatggcgcggcccagtcaaacccgagcgggctgttgcggtgcccagcattatcagtcgatggccacccgaaatggcggttgtccgtcgaggggtgtggaagttgatttggtgtatcgaatgaggtcgacgaaggtcgcggggacagagaaccgcgccgaacgccaccaagaagcgatgatggatcaataggatcatgtcgcggactgaattgattgtatccactgctaagatcgggatccccacgggtgccagcaccgccgaagccaaacttgctggatgagaatatatttgagaaagcagctcgccgagagggcgcatggtcagaagagctgtccatggtgacaccagtcgtgttgcttcgagggaacaatgacattgggtttgcccagttaccggtatagctcgatcgccgccggcgtgcaccgattggatccagctcgtcaatattacgagggaaggattgactctgaccgggtttcaaagatcccagcataggagactcatctgccagggttttcccacgaggccggtgaaacccgaaaagaccagaaagctttcgcgatgcgcttttcggggcttccccagcagtagacaaatgagcaccttgggattcatcccgccgattttgagtctctagtgggctggcaaagatactgccggctcgactgtccgaagagacaggcgatgctgggccgtgaccgaagctatctaaagtagtactggtcgcctccatggttgcaaatctgggacgaattatagaccgtgggaattctggcgattcctcgtcaccaaggagatcggatggcaacagggcatccgcacggggactcatttgcgggttattgaaagcaagttccgtatccgagcgcatgatctcagggggatcagagaggcctgtaagggccataccgttattgatattgaaaaacgcagagctcggagggaatgtaggcgagtgaccggacgggttgtagttgacgctatttgaaaacgaggtttcgactgccgggaagttcagaggggaagacatattgctgttgagtgagctgcgatggcgacggggccgaatggtggcaatattcgacatgtcgagatccaaggtcgggaaggcaaagggccctgagctgccgggtcgttgggcagtgagccactttagacgttcttgggcttcttgatattgttgctgggcttgcgcgtgcagattcacaagtgtggcataacgtgcgtgcaggttgcccagcttgtgctcccactgacgagctcgctcgttgtcgatccgatccagctccttgccatcttcactatcgccttcttgtaatcccattctttcttcttcgagcttcttgacccgtcctcctttatcctggatctcatcgtcaatggtcttcatctccgcctgttcttttgcgatcttggctcggacctcatctgcgcgcaccgccccttcttcttcaattctggccttgtcatcctttgcctgtatagcatcggagttcatgcgtgaaatcttctcctgccatcgcaagatgtcattcttgcgcttcttgcgctccgcctctttctgctgaaggagtctcatgcgttttgacttttcgccctgtacagttcggttgacgctctcgagcttgtagacatgctttttcaaatcgccacttgcttcatccttctccctgacgcgcttccgcagttcactgcgctgtttttcaagatccttcagcagtgcaatatgctcttcttcctcctctgccccctgcttttccacattctcgttctcgtgctgcaatgacttcaagcggtctgccaattgctccaaagtctcatccttggcagttctggctctgcttttgagtgtctcttcgaaattcccgtgtgaaacgtccccagtcgcaggtgaaattttccgtccggccgagggccgtttccccggtaattggcctgcgctatgctcacgagacattatcggggcggatggcgtcggcagacctactgtagacctagggatcgatgcgcggataattggacccccggcgctgccattctgctgggcttcggacagtggaagagattttgttcgaacatggaggatcgcactgggcgtgtgaaagtttgcggcactaacggaaagaacacaaatatgatagatgttacccggcaatagatttgatatttccacagctgtttctgctcgtttggattcaccgactagagactgttagtgctttgtttagcgacaagaagggattgtatgtcttatacctttcgtgttattcacttgaatgatatgcttatgtattgagttatgaaagtcgggctgtttccaagcaagacggatttcacgggctgtgatctcttcgagggtgacctctggcggcggaggaatgtcgagaccgagtttctcaactaagacctcatttgaagtctggcagacttgccaggcacggtagagaagccttgataaattgagtcagctgagcaaagggaatgctggaacaaccaagggacttaccagatcaaagcccacaagatcgagacggcgagaaagagggccatgacgcctcgcactctcacgcgagggaccactgctgggtaagcgtcaaatgcaaagtataggggctcatacatcccaacgtctgtaacccattggacgtgggcagcgggatacaggagaattgcaaggatcgccaatgctctccggagtgggtgggataggcacgtgacccggaatattagccacccaaaataggttagcgccacagcggagatcagccgctacggcatagaccgcttaaacggagtacggcctctatactttgacggtatgatttacagcagttgcaatttcatgattataatttgtccgatatcttaatattttgagtatattttggatatttgaggtatcttttgagatgtctttttagctgtttgcttaatttatctagaatgccttctagatgccttctcagttccaacccgtggaacggctgtgtgagcttccatatgtaagcatcgtctcatagcaatatcgtggcgtgctattaaggattttgcctagatgatggttttatgttgtcatttgccacttaagaaagaaacctcaagcctatgttgtacactctataaatacgtgtctatagttcgcgtgtatataccaaaccttgaatctactaagacgattatgttatatcaagaggttcttccttctacaactccaacatacgagtataagggaatccaggattctccagatcctagaccgggagctggaggattcatctaacccttatattgtctttattattgatgagcgttccttccttgattgttttgagaatttcgaagaaggactacttagaacatcatgggatacctacgacccttctagcaaccgtcttgttgttaggaagcagaccataacacattcatctgcaagcggttcttttgccagcatatttagttcttggcctaaagacgacaattaccgacttatatcaaagcatcagtgagaggccagtcggagatgaataaacaggaggattactcatggaccctatacaattaggccgcttgaaggaatctccgactatggtagtcgaaatcgcgtgggcagaaacacggacaaagcttgtggaagatatgaacttttggctatcctagtgttatggagaagttaggatcgcactctcaatcacagtgcatgctcgtggaaagatcacgattgagaaatgggagcttcaaggcgcgactcctattcccacccagaaaatggagatcgtatgaaaacccgcaccaaaatgcgagaggatccaaggccacctccacctcgctcttgaagatattaatcttcaaccgaaaggggaaaaagacacagatttcatcctgacaccccgcgatatggaaacacttgcaaccggggtttgggcttttcagtttgatacttgagcttccgcgggacaactggttccgcgttccgaggttgtccgcctgctccaagtgtcacatggttcagttcaacttccccgattctccaacaacttggtctcagtcttcttctttttgtccctctgcatttctagaatttgcttcggattggaaaacttcactcccagctgtcaaaggtgctagacacccatttggcgggatgcagctctatcgctctataagcggttctgtctccaagacatggaattctatcaatccggccactcttagcggggctattgatgtcattgtcatagagcaagaagatggtatttacagttccccgagaggcgaaattcacgataactgatttggcttttctcttcaaggcaccctcgcttgttcgccctttcatgtccggtttggcaagttttcgctattacgtccattcgagaagaaggtggagttcaacgtgaatgggataaaacaagaatatgccatgaaattaggagagggcggcgaggcattctttatctttgaaacgaccgatgacatccccgcatccttgcagacctcgccgttggtatctccagcagccagtccaagagcccagagcgaaccggatcttctaccttcgctgcaggaaccagattaccttgacctagataaagaaagcggggatgcattgtcggaaggcgcaaagaccccgccggcgatggggatgccgttacgggcaaatacggacatgggtaagacacatctccaacacttagtttcgatctaagtccctcgactgaccgtttcaatagggacaataacacccttatcgccatctctcgatgaatccaatgtggcccgttcacggcacggttcgttgagcgataaaccgctgcttgatcatacactctcggaaaacgtgctctcgaccagctctcctcaacaatctctctccggccgatctgcaaatgggaatgatgaacctcgtgatattgatatcgagggcgaaacacagcgccctcgtagtcctcctctgtctgcccaggaagcggtctctcgtgcgatttcgctttcaaagaagctgtctgggtctaatattccatcacatgtcaccgagaccggagatctaatgttggatatgactggctacaaaagcaacgaagaagatgcccttcgcgcggaggttgttgcacgcaagatccttgcagaagagcttgaaggaagctatgatatcggtgcactgattggagccgatgaacatggtaatctatggatatacagcagcgaagagtccaaggaaatggccgatcggagagccactcttcactccatgcgaccaaacatagcgatgagcgatgatgctctctccgacccaggatatcatagcgaaggcgaaaacgctgttttggaaccagcattgactacgcgccatcatcgaaccaaatcagatgttcaacccggctttcccacacccccagattcacctttgcatgagtcttaccccattgaaacccgcaactatgccaaaacacttcgcttgacaagtgatcaacttaaggccttggaactgaagcccggcgccaacacaatgtctttcagcgtcaacagagcaatttgcactgcaaacatgtatctgtggaatggcaataccccgatcgtgatttctgatattgatggaactatcaccaaatcagatgcgttgggacatgttctcaatatgatcggacgcgattggacgcatacgggggttgccaagttgtacaccgacattgccaacaatgggtataatattatgtatcttacaagtcggtctgtaggccagactgatactacacgagcctatcttcacggcatttgccaagatggatacagactaccaagaggtcctgtgatctgcagccccgatcgcacgatggccgctctgcggcgggagatctacttgagaaaacccgaagttttcaagatggcatgtttgcgggatattctcaacctcttctgcggcaaagagaatcccttttatgctggcttcggaaatcgattaacagacgcattgagttatcgttctgtgaacattccgtctactcggattttcacaatcaactctaatgctgaagtgtctctggatttgcttagtctgaataagtacaagagcagttatgtgaccatgcaagagctgctcgaccatttctttccaccaaccagccttcttgtacacgacggtggcgaggaatatacggacttcacatactggagaaacacaccgcatgagattgcagacttctcgtcaacagatagcgaggatgaagacgaggaagatgtcgaagaagaactagccgaagaagaagaggaagaagaggaagaggaggaagaagaagactacgatgaagaattaagcgatggtgaaggcagcgagtaccttgatgaggctgagttggccgagggcgatctcggcgcaagctacatctcgcaggactccgttgccttgtccaaccaagcagcctcaataattgaggcagtggaaggcgatataggtgccgaagagggggctatcggtgaagaggaattgtctcccgtcatcgagaaagcacaagaaacaaccgaaccgagcacaaccgaacttcccatccggtccaagatgccgcaaaatctttgaacatacacccaccactatgtttttgctaaggcatcgatccctgggcatttcttgcgtcatagatacccgtctgcgagtgctttactgagtcagattctgcattagacttccctgacagcgatatatccacgttcaacactatttcatgcagacatggagttggggactacattatacacggccgctcgtgcccgactctttttagttcatggcgtttctccatttgtttttggtacattcatggcgcacatacataggatcatgagaatgggatgtaatgaatggaacaagtgaatagtcttgctcaaacacaatgaagagcctgatatattatccgagggtgatctacaatctaatatagtaaaagcattatgtagatttgaccgtttgttaaagtgatttagttcacttgtgactgcaggcaggcgacgcgattacctaagcgtgatattggctgagccctggagctcatgtttcttttcggcctcatttggccatcacttactctctctccatcacacattaaacgctacttgcatctttggctgtttcctagcctctgagaattgtaccaggaatgctgcccgactacatttcccaggccgtctaatcatcacataattcaacatcttgaccactttcgcaacagtgcaattcgctctttctttcctacttgatctttgatcagcaatccaagataaaatggcatccccaagccaaccacagggccaagcacccaccacacaacctctcacaccacccgccgaatcctccgccacgaacgggacctccgcgcccgccgcaacaagctcccacacccaaccccatgtcccagcaacgggcgcttcaacaacagcaccacaaccgcctgcagtccccgggatatcaacccaggacagcggaaaaacgcgacgaccaagggacgtgcggctggtccacatgctcctcgcctcactcggggtaacctcataccaagaccgggtgcccctccaattgctcgacttcgcctaccgctacactgctaatgtgctacaagactccgtgcacctcgcaacggaaggatacgccgcggcaacagacggtaccgcgggcgcaaagggctccggcgaagtaaatagtgtttctctgcccgcgttgcggctggccattgcatcccgcttgcacttccagttccagacagggttgccgaaggagttcctcatggaggttgcgtcggagaggaatcgtatcgctttgcctggtgtatcgcggggattcgatcctgctgctggtgttaatggcgctgttcctgcggcgaatcagagtgttcttattggtggcatgcgcttgcctcctgagcgcttctgtcttactggaatggggtgggatttgaaggaggagtgggatagtgagggcgaggaagatgaagtgcttgatgtgatgcaccagcctgggactgggaagggctttggtggtgatggagctgaagataatgaagacgaggatgataatgatggcaagatggaggatctcttcggcgaagataccaccatgggcgaggcaggggatggagatgaggaccggaagatgactgatgtttaagggagtgcatttacgtcaggggcttcttctgtctttggtctcgggctggtggtgtttctggcgcttggtgttgttctcatttttctctctaatctgccatcggacagggtcctggttgtactatcacggagagcatctatttcatgacttgtgtctacaaattggggtaaaagtcccctcgcctgaccatagaggcaaataaaccgataaagaagacaactttcggtcaattaaaccaagatatgcaatcgtctgtgtatattgtacataatttccatcccatcgctccgcattcgggatgatcatgcaatgtaataaagatgcccagcaaaacgcctgctttgtttgcctgtgtgcgccgtgaggagagagagaaagatataaggtccgagtccgagttagccaggaaagtccagggccgacatccccggcgggatcagtctgatatctgtccatcaaaccgatgacgggtagcaggccgggaggggctgccggactgtaacatgcaagacccagccaatcaggcagtcaggccaggaagagtccaacagctctttccccctcgcccaaacactcagcccaaagaggaaaatcctcgcatcccgacctcggagaaacgcaagaagcagaatactcaagacgccgaaacccatataaacaagaaatactcacacaagaaatgaagagaacgggggcgggagggatacatggagtaaataggaagagctccaatcatttttccgccgctcgtgtccgcgcctcatcctcgcgcatcatgcgaataacttccgcacgacgcttctcaacccgtgcaagatcatcctcacgcgcgcgtcgccgttcctcataccccgcgaaccactcctcacgtgcgcgatcctcttcttccggcttcgcgtgggcgaccatgcatgaattcattgcgagacgttgctggcggcagacccatgttgcagtgacagtgcggttgacggcgcactcggcaaatgctatatcatagttgggttagttggttgtttcagacatgttcgaggtgtggggagtggatcatggtcatgcgagccggagttgcttctccgcttgaaactcatgaccggcttctgcaagctcaagctatgcactatttggaaagaggtgatgtatttggcgtaggaagcaacgtgaattgtatacctttaatttcgggtgcgcaatgggcgcgtacacgcttgtagtacagcagtttcacttcttgttcttgaggggctgagagcggaagcggattgcgaagattatattttttgggtgcacttgttgaagaggtatcgggggatgtggaagacgtagccattgggactgtagatcgatctcaagatcgaaattgacggggctgagtgtatggactggtcgaccggagagtttgctttgagggggattggtcccggttgttgagggacaagatatgagttcggctgctccggagcctaataaaacgaatcgaagaggtagaagtagtttcaagaggggttcatcgaatggctttacagagaagatcgaggctaggtgggagtgttgattgcgagtgagccgagctcgggcggagagaatgttagttactattggcagaatcagaaaaaaaagttctccgactttgcatctcgatacaactcttctgttagagacatctgcgtcttttcgctctttgcgtttttgtttcttctacactttcttgtgctctatttattgtctcgggaattatcaacatcaaaactcagcatgtcgtccatgcgcaacgccgtccaacggcggaaccacaaagagcgtggccagctccagggccgcgagaaatggggtctcctcgagaagcacaaggttagttcctgagaaggaggtcttggaatattttaccaatgattcaagctttctctcatgcgtagttttaagacaaacattctaacttcaataggattactcgctccgtgccaaagattacaatgccaagaaggctaagctgaaacgcctcgaagagaaggtgcgggatcgtaaccccgatgagttcgccttcggtatgatgggagagaagaaccggacccagggtcggcacggacgtggcaaaggcacagcacgagactctgccgcagcgcagggactgagccacgaggcaatcaagctgctcaagacgcaagataagggttaccttcggacggttggcgagcgggtacgccgcgagattgagcgcctggagcgcgacgtgaaattgcaagatggcatgaaccaggtccttggtaaaaaggatgggaaaaaggacgagagcgacgatgacgggtttgacgacgactccgatttcgatttcggggcgccggtgcaatcgaaaccaaccagggtggtgtttgccgatgatagacaagaccaactggcaatgaagaagcagaagatacaaaaagaagaacctgcgctagattcagaggaagaagagcagacgtcaagcaagacccgcaagacacctaagcagcttgaggctgcgcggcaagcacttgcggatgctcggcgggctcgcaagctccggaaacgagccatcgaggcccgacacaacaagctgactgcgttgcacaagcagtacgccgagattcggaccgcagagcaagagctcgattggcagcgggccaagatggaaaattccgtgggaggcaccaacaaggacggaatcaagtggaagatccgtgagcgcaagcgctgagtgtttttagtgttttcgtttcgacggagtttatgagtgatgactgcttatcatcttttttgtacatattgataccaaccaccatagaggcagtccggcgcatacagtagcatccaaggaacccacttcagtcttggccatcgactcctggaaaagctcgataacatcaagcctgtctcaggcattagctggaaaactcgtgacaagacatcgccgcttatacgggtagatttgaccatcatatcctggctatatctacatctaggtgtggttagttgttgaagtaatatcaacaggttctctttttgtccttctgtccttctgtgttaaattctgaatgaatgtctatacacattccacaaagggtccaattctgtactccctacaaaccatcaaggaacatcatgaccgatatagctatctcttgagcgagtctcatacagcaggcttacaacgtgttccgctgaagcgggcaatatgtgtggtctcattaccgcctagttcaattccatccaatttcaacatcatttgcgcatgtactgtattgctcggcttcttacattcaagctcccgcttcttgatatcagctgtctctgaaaagggccgtttgtgaatcgaggtttggtccagtgatcgggatgcgccttgagaagcgtttctttttctcttaggtctatcttcaaggacagcctcctctgaggaattaggtcgaccgagtgattcatattggtgactcttgactcaaattcaattcacgattccatcttaacattggagtatcgagtgcgtctgaactgccgagtccggattgagatgaattgaagcgatcaacatcaggtttatctgagatgctttgtctcaacgtgagtgttctccgggtggagctctagttgtggcgaactatagaaggatgagacatatgcagctatgtacatgtggagtaaacccgaaaagaccatgtgtatactgcaactgcaaacaaagggatagagggaatgaacgctaaatcaagtccaacatcccttgccatatgtgtaggcgggtgcgattgcctacttaggaagaagagtcggtataggctggtcatgtgatggagccttcacagtgtgccatttctaagattaacgccacgattgctaagcgttgtctctgactggcatcggaatgatataaagtgtactccgagactccgttgtcgcaagagttctaaaaccttcaagtaatcacgccttcgctgataggacaatctctttaactaatcgacaagccctggagggcatccacaaggcttaataatcatttgccacccctccaaagaaggttatcttctccagatctttttcttttctgcacttcatatctcaaaataaaattcacaatggctccttcatttatgaccattgacaccaacgacatggacgtggatttctcctcgcccaagccaatccacgcaaagcgcaccctcctcctggcacccccctccatcgccactcacgaggacaaactccgcggcctcttcagcaccttcgaccgctcaaccacagacctccaaatgctcgaccggctctccacaggcgtcgtctcccttcccgcaacaacatacgacctcgtcctcatcctcaccgacacagacggcgcacggcgctccgaggcgctgcaactcctcactcgaaatgtatacgccaccctcgtccctgccatgaaggccggcgccaagttgcagactcaagacttagcccttaatgcctcggatgccatggaggccgtcctggccggtctcgtgcagtccggtaacggcttcgagaaaccaaacttcgagccctccgccgctgtccctctaaaattcggcctcaggaagaagaataagcctaccccgccaactgcagtccctattattcctacaggattcggtgcgccgatggggattgacgcgcccgcgactaatcacgaccgcgacgatgacgacgagctcattaatgaagatacgctcctctccgaagaggatttaacaagacccataatgccgcgtatgtcactcccttccaaccatttcatttctacaagacctatatcatctaacaccatcctcttcagccccagagtgccaacccaagaccggtcgccgacgacgcgcctgcaaagattgcacgtgtggtctagccgacaagctcgaagcggaggataaagagcgccgcgcaaacgcagataaacaattgaatgtgatgaagctggatacgggcgacctgaccgagctggacttcactgttgaaggcaagaccggttcttgtggaagctgtgctctgggcgatgccttccgctgtgacggttgtccttacatgggccttcctgcctttaagccgggccaggaggttcagattctgaatgatattgcgcagttttgagatatactccctatttcacgactgtggggttcccttttttttttttgaagtgggggtcttcggtctttgcatttctttgagcattcttttcgggatttgttttttttttttgggttggttttatacaaaattatgctaggggcgtctggctttcattaatttgaatgattttttttactagtactatgagtactatctaatcatgactcacctgaagatttcgaccgagtggatccccaacgtcatgtcttagatctgatagtgggatagatcggcctagtatacagatgtgccgttagtctgccgataattaatttactttactttatttacttgatatattctaatgattggctgtaataatcaattctaaacccaatggcgactaatttgcattttaatgtatctgtgttcatgccacgtccaatcatgatagaaccgaaaagagaacgtaacccaaaaaatatgtcttatctgacctatgactgattcttcttcatgtgggcgacacggatgctgacggcacgcttgtgcgcctccaggccctcgacagcggcgagagtctcgaccgtcttggcgagaccgagcaggccatcggcggtgaggttcgagctagtgatgtgcttcaggaaggagccgaggttgacacccgagtactgcttggcgtagccgtaagtagctggagagggatatgttagcaagattcaattaggatataagggaaaaagtcgttgctgagaaatacttacggagcgagtggttgactccggcggagtaatcgccaacactctcgggggtccagtggccgatgaagacactgccggcgttctggacatctttgacaatagactcggcgttctcgacctgcaggatcaagtgctcgggcgcgtagtcgttgctgagggtcatagcctcctcgatgtcacgcacgacgaaggtgacagagtgggcgagcgagccgcgaacgatatccatgcggggcaaggccttagcctgggcatcgacctcgtcttcgatggcacgcaattcggcctcgtttaggccggcagcgatgaggattacctgtgagtcgatgccgtgttcggcttggctgagaaggtcggatgcaacaaaggccgggacagcggtcttgtcggcgatcacgaggacttcactgggaccagcgggcatgtcgatactgacgcccgcggaggtatcgttggacacgaacatctttgcggccgtcacaaactggttgcccggaccaagaatcttgtcgaccttggtgatgctttcggtaccgtaggccatagcggccacggcctgggcaccaccggccaagacgatgctttcagcgccaaccttgtgggcgacgtagacaatctcgggagagatgctgccgtcggagcggggaggcgaggccaggacgatcttgctgcagcctgctacttgggcgggaacacccagcatcatggcagtggagggcagcacagcggtaccgccggggatgtacaaaccaacacgctcgatggggcgcgagaagcgagagcagaccacaccgggcatggtctccatctggagggtttcgttgcttcccttctgcgcggagtggaagcgttcgatgttgccaatgctgatatcaattgcctcctgaacatcaggggacagcttcatgagttcagcggggaacggcgcgtggataacgggggaggtaagtgatgtagcgtgctcgaacttgtgggtgtatttgagcactgcggcgtcgccgccatcacggacatcgtggatgattggcttcaccaggttgacaatggcttcgttagatttctgagaaggacgcttgaggtaatcggtgaccacctgaggagtagtagaggcagtgatgacacgcttcatctcaattcgggttgtgcgatcctcaaccggggcgggtgcgggggcaggggcaggggtaggcgctgactcgggcttggccaggccagccttttcagcccaaggtcccttggcgtcgccctttctccgcttcaccttcaagctcttgaggtcgaggttgcgctcgatatcctccaggctaacaccagcagcagtgcacttggttagggcgaagtaaaacaggtcagccgcctcgaaagcaatctcatccttggtctccgcacggcacaattcatcagcctcctccatgatcttagcatcgatgagcttgggttcattgaataaacgcgcggtgtatgatccaaccggagcatccgccttgcgggcatccaaagtcttttggagacgagacagaccggaagatgcgccaaagcaggtctctgtaccaaggtggcagaatcctaatgagtcaccacgattagtatacgaacatcatccattagtgtaggtagctggttcttaccacgtccaatttgcttgacaacaaagaccaagcagtcggcatcacaatcgaaaccaatgcggatcaactcttgcacatccccgctggactggcccttataccacagaccacgcttccggctctggtaaacaccggtgccagtacgcaaggcctcaacaatgctctcatcactgctccaaacaaagcctagacaggctccccgctcatcagtgacagaagtggcatacaagccattggcctggtcagtaacagcggtcgacgcgataagcttagcggcagaaacctggccagccacatcccgctcaacggtcaatgcctgtgaggggacaatagcaatcgcgccctgctttgtgacgtttgtaatggcatcctccgacactgtctgagaaccgaaagttgtgaagagccgtggggagtccgagctaatcttcaatttctcggcggcggcgaggacggtggaaggtgtagtgcagacgctagcttcgctgcgctcggcattgacggcgatccattgctggaaagtatccaattgggagtctgacagggcgttgacaagtagacgggaagagggcacggattgttcttcggagagggtggtcagttgatccaagttgatcaagatcttagcggcaccggcgttgaggatatcgacgagatcgccggtggaggagatctcagttgcatcgacgaagatatcgagggcgcggaagttttggcgcaggaattgctctgcctcggcgagagtcgcgactttgatcagtacgcggccgaagtaggcgatctgcttgagcgagagtccggagccggaggtgggggaggaggggtcgtgggagataaggaagggggtcgccatgatgaggtagatgtagtagttaaggatcaaaagattgaaggggagaattatatcccctaaataataggaccctttgaattaataggggagggggggattgtggaggagagcgatgactcccatccaaggttgtgctaccttttttttttcccggcccgcacccgctgaatcatcgtttgattacatccaactcgacttatcgtgggattttattggtgatcttattttgtgatctataacattttgatctaccgtgttcattgcattttgcattttcacattctataacagatttccattcatgaggtccctggaccatgcctgccttaactatgagccatctcatagacaacgtgatacacagaggtttcactattccggtgatcttgaaacccttgagatatggaatctctcctaaggaaaacttcagccttgggcttttgggtgatcaaaaagcggcctcccgagaacaatgtcagccatgctgtaatagcgcctgtctcctcccgcgatattactgtattcgcccacgggtgtttctcccagtcctgtgttgaaagttggacatatgccatggcgatattgctttttgaggacacgactcaccacctcagatcagtcctgccacagtggtcacctttgtgtctcctaacccggtgacttctacaacaaaattgcacccgagtatggctccattgccaagcatttacatcaacgcattggactacagagcatgagccacatgggtcgaaagacacggaggatcggattatatccgttgggttttgtgccacatgcgacatctttggcttacaatatcagatgcaagatcccgaagcatcaaaagagaacaggtaagacgaggtgaatcacggatacgtgcagctccatttgggagtatctccgctagtcaagttgacacctcgaatattccacaccgaagatgggcaggcttaagcgtaagccattcaacccccaggaagtacaattcagtctgcattcttaccaaccctcaccggtcataacagctcccaatctggcaattgccattgaggtgccgtgcagtttaactttacattatccctgcccctgcacgagtaccttgccaatagctgcaactgtgagatctgcaagaaaaacggctacttgctcgtgtacacctgcatcaagggttatcattaaaggcgatgatatgctaaaagatcatcacttttccgagcgcaagatgaagcagtgcggaggtagttgcttcatctgttttccgagaacagggattccaccaattacccccgttaatataagttgaacggccaatgttatgttgccaagtatactagctacggctactgcaggactttgacatcgagaaacctgattctcaaccagagtgcaaagtcttttatattagttattttactgatgctacccaggtatgatgctatggatgattgtaaattgatgacttaacttagcaccgcctagcgtagaaatgacagcagagggcatatgttacaactaagcgatatatatcacgctttggaaatttatccggtgctaagaaggatagatgccagggtatggtgttcaatagccggtacatgttgtattctcgaccgatatctccgaactacatgagacaagtggttggagttcgaatgcacaatccatcggcacggacctgtatgatcgacataaatgttccttggttggatctaagtccatcaggatctccctcaaaacgtggagaaggtgacatagacatatattgacggggtcagacactctagtccggtgacaaagcccatcacgctgaggggtatgttgcatgtcaaagcggcgtgacaggacgtgctcttccttagccaagaccgtgctagtcaggtacatcctagatgccatggatatgaacctccgaagacagcgtcatgttttctcgtcacgccaagcggtcgtctggcttggtcacccgtatagttctctagaatctgagtcaaggtcgatctagaacattgaatactcgagtatatctacaaagcaacaactcagttatgtgaaaactgagaccaaagatacttcggcctcttacattctccgatgccaatagtgggtggcgtccttgcagatcccccatgcccctggatcttcaaagtccgattggacccttttatttggcaggaatggcatctaatgcacaattcccgactatttcccgattttatggagatctgcaagtgacatgaggaatagtaaacaaattgggggtcgcgtgtgggtgtctgcccgcgtgctgccttcctctttcgcctggcctctgtcttgtcaactgcaacctcactatatcctcattccgcactcccatcatatttaagaattgcattgacctgctgtgtcgcagttcaggtggtctctcgtttgcaattcaaattattcttacatgtgcccccctgcaccgaatcttgcctaaataaacccgtatatctatacccaaccacatccacttcgtaatcatgcgcatctcttctctgtcactacctttggtgctgggcctggctgggtcttctgccgcctatcctcaccctgagccagaggcgatcttgcgccgccagtcggagagccagaccaaggccgatgctgtcaaggaagccttccaacatgcatggaatggatatgtcaaatatgctttccctcatgatgagttgcaccccgtgagcaatggttatggtgactccaggtgaacatgtccgattatccagttcttgctgtgaaactgacacgcgataggaatgggtggggagcctctgctgtcgatgcgctttcaactgccattgtcatgggtaaccatgatgctgttcaaaagatcctggatcacatcgagactattgacttctcgaagacctcggatcaagtcagcttgtttgagactactatccgataccttgctggcatgttatccggctatgatttgctcaagggtcctgcatccaatcttgcccctaaatcagctcaagtcgatgccctgcttacccagtccaagaaactcgcggatgtcttgaagtttgcctttgatacaccatccggtgttccctacaataaccttaacatcagttccaagggaaatgatggctcgaccaccaatggtcttgcagtaactggaactctggtgctggaatggaccaggttgtctgatctgactggggatgatgagtatgcgaagataagccagaaggcgcagtcgtaccttttgaaccctcagccatcaagcggagagccattccctggcctggtgggaagcaacatcaacatctccaacggccatttcaccgacggtgctgtcacttggaacggcggcgatgactcgttctacgagtacctgatcaagatgttcgtgtacgaccctaagcggtttgagtcatacaaggaccgctgggtcctcgcagccgagtccacaatcaaaaacctccagtcgcaccccgcccctcgcccggacgtgacttggttggcctcatacaacaacggccagtatgatcttagctcgcagcatctgacctgcttcgatggtggcagttttatcctgggcggcaccgtgctagatcggcaagactttatcgatttcggcttgcagctcgtaaatggctgtgaggctacttacaaccaaaccctgaccggcattggaccagactcgtggggctgggacccgacgaaagtgccatccgaccaaaaggatttctacgagaaggccgggttctacatcaacagcggctcgtatgacttgcgccctgaagtgatcgagagtttctactacgcgtaccgtgtcacaggaaaagaaatcgtgggtcattctcccttccactgatgttctaatatactgactcatatagtaccgtgactgggtgtggaacagtttcaaggcgatcaatgctacctgccgtactgactcgggctttgctgctgtaagcaacgtgaatacagctggcggtggctcaaagtacgataatgaggagagcttcctctttgctgaagtcctgaaatatgcataccttgtacatgccgagggtaagttgctagtcttcccagtcacccttctttttttcaaacattgctaatcctgggttctggtatagatgccccatggcaagttcagaagggccgaaagaattcctttgtgtacaataccgaggctcatcccatgagagtgtcccacacctaattcatacgagagttgggctatcactacagtatatagtgcatgcatcaagcctttattatcctttgtcattggatttagtactgcaaagaaagacaatttgtagccttctaaaccatagtaatactgaaaactaaagccttcaattcagacggttctccaatctggcagagtacagtaaaaacacaagtgccccgtgctacacttcagctccattggacattttataaacgtcaaataaaaaatggcgcccgatattgatacttgagtctgataagtaatctatactttatatcgagatgagcaattaatagttggacgcacaccatttggttgaacttaccgacttgcctgccaaaagaggggaaagacaacattggtcattgcatattgattctgggcctgtttaggatatatgtttcttatgaattggccagtcaacgaagagttctagctcggctacacgatatgattgcgccattttcagaaccggtgacacaatagctcgctagagaatgaatttctataaaacaggccataacacacctaggcaagacacaatgatgctatccgcaaagaatatcgcgaacacgctaaattactagtagacgccagagaagaatctccattaccgtgtataagatggcgatgcaattctcttcgaatacagtaaatagtagaaagcaattgatcgcaacaaacctacatatcacctacagccatggctctcctaaaacaaaccctcctagcagcactagcaacaacctcattacaccaaagcaacgactactaccgctcccgacccgacctcgcaccaccacagttaaatatcaccgtccccgccgcagacccgaatggctccgaatatgttttcatcgccccatactcggtggacgggacactggaacggcccggcccgtacatctaccgcaaagacggcgacttggtgtgggccggcacaggctactacgccgggttcgtggcgaatttccaccctaccacgtaccaggggaaacctgtcctccaggccttccagggtagtattgatggtgcgcatggtgaagggttcgggcagcatgtcctgctcgatcagagttaccagcacgttgccacctcaactgctgcgaatcatcgtgtttcgtcgattcatgagttcaatgttatccgcggagagacggctttgattgaggtcttttatacgactctggcgaatctgtcggcttatggtgggaattcttcgcaggtgtggttggggaatgggattttccaagaaaatgatattgccactgggaagttggtctttgagtggaatgctttggaacacgttgatccgtcaggtaagataatttgcctgactttataaagatcatatctaaccgtcgactagaaagcctactgccactgggctccaaatatgctaataatggactgtcgtccgccgaagcatgggattacttccacatcaacagcctcgacaaaaacgaagaaggcgactacctgctctcgtcccgacacacgagcacgatattcaagatcaacggcacagatggctcaatcatatggcggctcggcggcaaatatcccagcttctcacaaatcggcaactggaccttcggattccaacaccacgcccgctggcaaccgcgactaagccagccagggacggaggtaatctcgttcttcgacaactccggcgatggcactatcacattcaacgatgtatcccgggcattggttatccagataaaccacacagacagcacggcgacagttctccgcaagacaacagcaccttataatctccaggcccaatctcagggcaatgcgcagctgctttccgacgaccgaatcttcgtcaattggggttcggagggtgctttcacggaattcggtgctgataatgagattctttaccatgcctttatcgaaacgggggcggtcagctaccgtggtttcttgggtaactggactgcgacgccgagggaaagaccggcgttggttgcgttgaaaacggcttcgaatcttgttgagctttatgtgtcttggaatggggataccgagactgcggcttggagattcttctatgccaacgggcaggagaagacgcgggttggtcaagtggataggaactccttcgagacggcttttacgtggaagtcgacttcttcactgtcttcctctgctaggtttgttgctgaagctgttggcgcgaatggggagactcttgcacagacgggattgattgctaccattgccaatatcaagttgctggcgtgatagccaagattgggggacctcagatcttcaactccggtcgcagagctctcttcaactgtgctctccttctaccatttgtcattctgccatattcttctagacttactatatatacacccccaaattactagctacacacccttttgaactactttgggtcaggccttttggctggccatgtaatttaccgagttttatcaagtaatctacacaaccactaaatactagcactcccaactacccattattcgtatttgtaggattattactatcatctgttatgcaaatagctttataaaactagtcggaggcggtatcgtatcatctgaagaatgtgtagctagtaatttgggagttatagaggtccctgggaatagttgacaaactaagctccgatttgaaacaagttatcacttctccgacatgaatacgactatatttcccatcgattttgatcagagcaaggtcccaacctatgacttgatgcagcggaaggagacgatcatatgactttatgcggcggaaggaacacgatcacatgattttatgcagcggaaggacacaattcccatgagttataagtctggactaattaaacatctgcaaagtattttaggcggacctggtccatcgccagctcttccggcattggttgtaggaatttatcaatctcatggacccagaaggggttgtatgggttgacttggtgggcagtggtgtattcccaatatgaaggataccaaccagaagtttcccaatcgataataccaacgatatcatctccacgaacaagaatgttgaggctgctaaggtcgccgtgtgtaaataccaaaggccaagtcttgttatgctgtttgataagttcctggatgtcaagcggaagccttgaatcaaattccatgtccatgcgtatatgtcgatggaagtcttggatggtattaaagggaccgaatcgcaagtcagtgccagcaacacgacagtcagaaagtgatccgccatcaacattagcaatcatattgccttctgcgggccgaagcttccgcatctcgcggattttctcagctaattgcgaaagaagtttcgcctttgaattctcacttcgataaacccagcctttgccaatcatctctccctggatcctttccatcacgatatacgtccgcccggatcgagtaaatgcacagaaaacctttggtaccgggacagatgtattctgtgatatgaaccgcattgttgatgcctcagataaatcaacgccgcacccatacttaacgcatattccgcccgtcaacatgagaacggtcccttgtcgaggtcgaatacgcttaaggatttttatcgctataagtgtcgaataccgacgcaaaaaggtgttcttgactggtcgggatccaccagatgaagcagcggatggtgcggaaggtcctttttgactggacgacattatgattgtgcttgaaatgttcaagggaatatctcaggaatatctcgtttctagactgtgaagggaacttagcatggggtcttccataggaagtgatggtcagtgatgcccaggggttatccctgatggtatgatcccaggttcgaaggtgtttagggcccttcacgtgatatcacatgagccgggtctattctcgggccagctgaagttattgtacgaattcttctatcttccacttgactttctattgtctctcccgcctcaatttggttggggtctgctgggtctgcgctgcagtgtattttggggtggaagcgggttcgacgatcgcctagagtgcccacttatatagctggccacttctacaaacatgtaaacatcaaactctcgcttagatagcaagcgaactacgaataaagaaaatttctataaattagataagaacgaccacacttccattctgtccaaataggaaacaaagagtctgtctacattaaggactttacatgcacaaacatccatgcaaacattctgaattcaaagcttggcatcatgtttccagcccggcatatcagcgagatctttcgccggggcactacgtatagatttgagagcatcacccccaggtctccacctccacggaccagctaggtctggcgaaagagacccttctatcaactcaacgacatgtttgccgatgttgggtagaagcttgaagctatgactgtagtatgcgctgttagcaagccgctgatggtataaaagcccgcatttgattatcaactcacccgctatctcctgtggccagaataaagtttttccacttggggtgctcgcagattagtaaattggcgtcggcagtatctgtgcaccagcacatagaccggttgaaaagctctttatccttgaattgaggcatgaatctcgcaattgccttccgaatggttacctcggaggcttctgggtaggtatctgtaggatgtttggcgtgtgatcttgggacagatatgggtttaggagaggtcgctccgtaaggttgatgctgcttgaagcgagagaatccgggaaactcgtcgcagactttgataaccccgtacctatagggacttagcatgcggttctgctctttccaacattagatcaagagggattgcttactcgttgggctcgaagaagaagccgtattcgccatcgtataccacgggtgtgtttttgtacttggccacttcctcgggtgtgagctgaatatgagcaaagacccacgcctgcaagaatataattagtaactgattcatttgaaccgggatagagagaagaagtatatcgtgaacttactttcgaaacacactgatcctccaaatctaccaatgttggactccaagcaccagcagccaagaccaccttgtcggcgtaatatctagtgccatctattgtctcaacaccattgcatgtgatcccatccgcggtaaacagcggttgattgaaagttccagatctatgcaatttcgcgtcagtaaaataaatacaagctaaaaaagggtcattacatacttgccaaatccaaagttgacaccttgatcctttagaaagagtccgatcgcattgatggccttggctgcagcaagccaacctccatcgccacaaaacaagcctttccacccctgaatttagactttattagccgctggcccttcaaggttgtgtacgggtgaaatttacctttacctgctctcttgtaaagactggcatcttttcaagtatatcatcttcgctttctaacaaccagttcgttttctctaacccaatgttcgcgtcgagcattgattggtagctttttcgaagatctgcaataccgtcttcggatgacgagcagtcaatctgaatgtgttagtatggaatgttgaatctccaatggctatttttctaactcaccctgccgacattgtgaaagaagggcttgaatagtggatcatttttccacatgtcaagagcctcgagcgaaagttgcagatctggcccattgcgcaatcggatgcccatgatcttgttaagatcgtatcctgccgattgagccgaaggaatgggatatacatcaagcactgtgatattcgagggagtatacccagagcggatgaggtgcaacgctgttgaggaacccatggtgccgcctcccccaaccaccacgactttcgtggttgtacgcgaatacgccatttttcgggtcatttcggtgcgaaaaccagaatgagggaaaacaggatgtgaatttaagaagttgaatggcaccaattgctaagaaacttgctaaagcgattagataatccccatctatataacatcgcgtggaccttccatcgattaccccgatggccagaatccggccttggcaatgcggggaattaccaaattggcgataacgagatagccttttgcggttatcggccccggctttcgttccgttatcatttgatatcggctcactggaagtccatacaaagattacgccgccatgaatgcgcgtactttcgcgtggaccttcacccggcttgatatgacccgaatggaacttgattgaccccgaagctagaggggaacatccatgtctctgcgggtagaagagataagctcacatataaaaagcaactaggtcctgcaatcaatgtcgggggaataaatcaacacgcatggaaagcgaaattctgttgacatcaaagaccccgaaagccctgtcatggcacaacctatcataatgaccgacacaaagactcctgtctcggattcgcacgatgctccttctatcgctgataatgccatcggccatagtgctgtgattgacatgcagcactacaaggacaccgttccgctgtggaagcgagtatggcagcatagtctgacacagatgatgctgttgagcatccaggcattctgcggaccagcaatggctgatgcaattaccggtaagactgattcaccattatacgctaggctacagaatggcctggacctttcgctaatgttttgcaggcctcggtggcggtggtcttgcctctactcgggtgtcaaatatctcgaccgcaattagatatgccacgttggcagtcggtatgtttcattacccaacatgagtatttagatactaatttgaatagtctgctgcatcggaggtcctcttgtgaacaaaatcggcatcaagtgggctcttattcttggctcaatgtccttcccaatacaaggctcggcatactactgcaacagcaaatttggaaacgaatgggtgagcgatggcaatgacaatggaaacgacaagaaatgtgactgcatgatctaacaagtccctcctagtacctcattctgagtggtgctatcagcggtgtcggaactgcttgctggtatgtcgctgaagctggagccatcatgacgcttgccccctccggcgcccgtgggaagtatctggctctgtggatcgtttcgcgaaatcttggacaattggttggaggtgcaattaagtgagtaatgcctcagtcaaagactcgaatgggaaatttggactaatactttcgctctatgtagcctatctaagaacttcgaaaaaggcgtcagtggcggagtcacttccgatacgtttattgcctttgtgatcattgagtgtcttgcgtgggttcttataagagagaattgcctgcaaccttatgcttatgatgtttaataggctaccattcgcgctgttgatcacacccttcgaacgcgttgtccggtctgacggtacaaagattgtcacttcggaaactctttccaccaagatggaattcaagtatattgcaaagacgctgagctcgaaacttattattctttctgcgccctgggcactttggtcatttttctacgggtaagcccgacagtcactgccatcaccatcaaaagcgataatgctaatattcgaaagtggtacttggtctacatatctaggaacctatttcaccgtccgtgctcgtgctctctcgtcgctcatctcacctttcttttgcatgtaagtcatgcgaaatcatatcatcaacacaaactaaccttggtgcgtatcagcgttggctgtttcggcctcggattcattctcgatatgaagggtttcagccagcgccgtcgtgcccagatcggcctctacactgtcatcgtcctcaatgtcggcgtctatatctggtccattattatgcaggtcaagttcaaccacaacaagcccggcgccatcgattgggacgatggactgtacgcttcgtcgttcctaccatatttcttcgtgcagacgaccggtccgctgtcccagtcatatatgtattggcttttgtcgtccttcgccacagactcgcagggtaagtgactccatagactcggacccgagtccatcacggcattggacgctaatggcaatttcagaaaatgtccgcaatggtgccgcattcagatgcatcgaagctgttggccaagctattgcgtatggcatgaacacccagattaaaactaatcctctgattggattgtaagttcaatcatctgaattcgtcccttttgacaaaaagccaactgacctgattcaagctgcgtgacgttcgccctactcggagcatctgtaattccaatgattctgcttgttaacacgacaccggaccgtatccctgcagatttagttgccgaggagcagaatgctgctcttgagaagattcgagatgtctaagtctgtttgcatggcggggctgaaagcagcttacgcctttcaattaccaagcttgctagaatgatataaggagtcttatttgcccctacttggattgtctatatttcgtttatttaatctggatctaatggtcaacaattttgcttacttgaaactactcctttccgtactattgtaacgttttgcattcgtttcgtaacgcgcgatcagaccattcaatttgttaagttgagcattaatcaaaaaccccttatcatcaagctgaaaccaaaagaatgttctccgtcaaatcaaactgaaagacaggtgcttctcgtaaacataaaagtcgaaaggacataagaaatgaatagccaaaagaatgagggtaaacaagataaaacacactcgcatccatctcacaacgaaccaatccatagaaatgttcgttcgggcaaagcttcgccaagccctaaattccccagacaaccacgcgcattggcttcaacggtactcaacgcgctcgtagatgtactcaactacttggcgggagtactcgacatcctggtagtagacctcatcaccccggtagaagacctcatcaccctcatagaactcatcatactcctcgtggaagaactcctggtcttcgtagtagtcatcatcctcttcgtaggccactgaacgtatgactcctagcatgcgtcccggtcctagtctatcgagatgtctctcgatgactctgtccctttgaatcactcttctctcgcctctgttgaaccagtaatcgagtagtatgagaagtagcagataccagacttcgtcaactgaaggcttgaagctggagatgggaccgatgaattcagaaccgccgttccaggtcaggtgttctcggaagttgaagttgcgggaccggactggttcgctttcacggcgtctggggaaacgcacgaagtcttcgaagatgaataggatatgacagaggtttgaggcataatagtcgcatatctcgaagtgcgcgtgccagaatgaggtaccacgggggtagacctttttgcagatagtgacaatgcacatgttaatgttgaggattggggctgtagaagttgagcttggaagaaggtaggtttgaatagagtgggaatatcgaagctgggaaagaagggctttagtcttgatagctgcttgagaaatgggaggatttggccggatatttaaagcacttcatcacccccgtataatatcagctttatgcttttctacaatcaggcaacatacatcaagcttagatatgattataagcagtattttccgagacatttatggccaatagatattatgactcgacattttgaggcggccagtagataggcagtgtatacttccttgctctttataacatcaagttatattccatagagggagtccacgtataggttcgcttgattttgggatggcagcctatcaaaatctcatagtatagtatgatacttgctgcattgtggctttggctccatcccaagagcttcaatattcaacctgattatagtaatgtgtattgctattattccctttctctttctactattttcaacgggattgctagggtaagagcctctttgtcgctacctaccatgtttgcatttttgcattctatatgcctcgtttgcatcatttgcatctgtgaagactattcactataaggtattctctgagagggggagaataacgcgggcatcgtcaatcacctatcaagagcacacaatgtttacttacactctcgcatccttgcatccttgcactcttgcactgctggatcaaaaagaaattctttccatctgtttcaaaggtggtactcttgatgttcacagtaccacgtcactctcatcatgataatgagtctacctactagtcaacacgaggctgaccaagccgaggccaggcaaggtgaggcagatcagaaagtgacaacgtggacatgacagctgaccaaccagctctagagcaatccctgatcttatctcaaggacccggtatcaatattagcatccaggcctttgacctgcgccactgctctcttgacgggcccagcgactccccaggaggccaccaatcaccctcggcatctctgggtagaggcaccggccatgccagcgatgacacagattctcactcgtccactgaacagtgcagcgagaacgaatcatctgaaaacgcgttagtctcacctcaaacacctctgagacaaatgatcccaacatggatctcgagcctcatttcagtctcaccccgactaaccattgatggaagttcttctcggcctccaaggtcacccagaatgtccgacccctgggatatctacaagtcagatactgctgtcgccaattaccgcgcgatcggggcccaataccaagcatggatagccgatacagccacaaccccatgcccaatccacctatcaacactcaccatggtagacatagtcgaaaacccgcatgaagagtacaggttcgaggtatgccgcaacgagttcagatccccacccgatgaagtggggaacctcgaatcggtcgggctctcgatggcgaatacttggcgcctccttttcctgaggcgacatggatcctgggatgacgatcgccgagagggttggacggcttaccagcaccgcaccgcacacggcgcgatcttcgctgagaacatcaccagacacttcggaccttactggtcccagatcgctctggcgcagtacgcgtacgaccatcacatcgacaccctccgacatgtttatgtagtcaacattcagaacttgtacacctggccgtacgtggaatcctgtctctacccccgtcatggcttgcaatggcacgaggacgatcgataccagtgctgggaatacggtaccagggagtatcaggagctcctgggtaccaagctgggaaggggggtggcgcgtctggttctgagcgcttggccgagaggcactcaccgtatcgaggcaatcatcacgtggacgtatgttgggaccttgcagatgcggtttgatatcgggcgaatttgattcatggccgagggacacccactgtatcgaggtgacctgcacgtggacgtttgctaggaccttgtagattcgatttgatattgagcgaatttgatttgtgacttcgagcttcgtgaaccaaaagagcgctttgatccaatgtagagcgaatcgtatgaagaggagaagcgctagcctctcttggcggtttcggcagaacttagagtaagaggtcgattggccatggcagggaataggctcatcgtagtcaatcagatgccgggggtgttggaaattttgaaaccctatatagtatgtagtatagtaaggcgtgggagacatcagttgacaatggtgcctaatcaatggacaaggcagaatccgtcgatctcaacactattgtgagagatatatagtgcgtctggattttgatgagccggcatcctatcaaccccaagcactatgctccggtgtcatattcacaccaacacgggcctaatagaagttgatattaatatcggcagcaagcagtttgactgcgccacattttacgtctctcactcagcttcaccatagtgctatattacatgtagatatgaagaattacaatgggtactgcgggtataccaatagtcaaaaggtcaaagacatgattcccaaataggaaagagatttcatccagtcctctgccgacaaaaacatgacgatttaataggcacatccgcccaggctaaatcagctttcagtcgcggcagcatggcacgcgcctcgtttttctgacccatcttgatcaaacactcaaaatacccatgcgaagcccatacattcgctggatgcctcaaagcacggggcagagatctgtcaaccccaaggtccgcagcatatacggctacagcctcctcgacgcgatcctgttcgagcaacaacgctccaagtgcgtgtctagccggctgcatccagccccacggctcgtcatacggcaacgaatcatctctcctcacagcttcccggagatatgaaaaggcagtatcgtattcgccccggcgatatgcaatctcgccatccaacatcgcctcaccgacacggaggatgtcgatgcagcggttattgaagatcgtccgtgaagccgggacaagcttcatcgctcccagaaaccgttctcgctcttcctctgcttccacaacacgactggtcgcagcgaacgcgatcccctttgcatagtgcatcatagcagtggtgacgcagtacagctctgcgccttccggcagttccgcagcaataatatcctcccagcggccgaagcgcacaaacacatgcatttgcacggagataaagccctccagccagtccgccatcggcggcgactggatgcggaggagaggctcagtgattatccgggcgagctcggccccagactcgagtgcgaccttcgatcgaccgcccagcatagcagcataaatcctgaaatgataatcatgcgcacggtaaagattataaaaatggcccaggggctggttggcgaggaacttctcgtctgcgcggattgcagaggtattagccgccactgcgtttttgtaaccgccacacaggacgtcaatatgggacgacatgtgctccagatgaccagcgtctggtacaaggccgcgaagagagttggatttcggcagggcaagttcaggaatgggggacatttccatcaaatggatgtagagatgcaggacgccgggatgatcataggagtcggcttgttcaaagactcgattcagcgccttttccgcttccagtgttttcgcacctggcgccacctcgccggtcttcacgtcccacagaccccatggggtcaggttcatcagcgcatcgcagtacagcgcggtcacgtcgaggtcatccgggtaatcattgtacactgatgtcattgcctcggcataattcttatcccattccgtgcagtcttctatgggctgttcttggggataccggtgctgcagtgcatcgataagagcattctccaacggcgtcgcggtgggagcgtgcttcttggcctctaggatcgcgcgatgggcgcgactcgtggtggcggacagatcttctccgtcgaatagctgccatggcttgttatagttcggacccagggcaaaggcaatgccccagtatcccatgacgcacgtccggtcgaattcgacgaccttttcgaagcatcggatggattctgcgtggttgaaggcgtaggcccagatcaagccccgactaaaccatagttgggcatcttcatttgttgtgctcacattgcgacggtagtcgcctaggttatagtagtcctcggcgggagatggctggtccattttgttgatgtggttgcgtatgttgtggcggaggaggggtatggttgccgaacacggctctctcccagactcatatctaaccactttgaccacatgtgacacggggataagcgccatagcaaatgatgtatatactgggttatttacaaatagtcgcagctgagtaaagtgcctgaggcagtatatcctgaggcaacaaggcagtaaggcatcaatccgccccacatgagcagatttgaggaaatccactttaatgtgctcagtcatgctcgatcactctcaccttccaaggttgagcaccttgggggcctactgggaatcctatttagatagcctcctttcatctctctttgtgtttgttacctgcagtcaatatagtcacatacatatcaatcctcttcgatcccatctcattccatctcatttcaccagcttcacttttatagatcaccatgtgtggagacaccaaccgcccaacattcggaggcaccattgccgtcctattcccccgaggcactcaccagagctcgaacacttcagatagatcattgtcctcgtcaccagaatcagtatcctcatttgcatcatcatcgtcgattgcctcgatgtcatcatactctcttttcttccgcgacacggatgcaacaacgcccaagacaagagcaatcttccggacacaagacgcagagacatatcacgcactcaaagaatgtcgaaatgtcgatatgcgcatcgagtgggttgactctgttccacgagtcattcaagacaaaatgctgacagttcatatcaggaaattcggcgatctctctattacatcacaatccatctctccgctccaccagttccgtttgaatatgggacaggacaagaactgcaacacggcgaatccgatggagatcgagttcgagctgcccgaaaggctggacctgggcgtctcggacaagggtgtcatcggccgacaggtgactgtcagagagcaggggggttcgattttggggatcggagtggtgggatacaactaaagtgactggcttctacatacttcatagacataattggaatcaaactaattgaaactcaaaactctacttcattatagacttcaaagcttcagcaggttctccacaccagcattgtatcgcttctctgcctcagcccaatgaataatcttccaaataccctcaacatagccagccttgttgttcaagtactacaagcaagcagtttagcagacaaatacacacaagacgggtagagcaagagaataaacatacctggagatagtaggcatgctcccacatatcgacaccaaagacaggcacatcaggagcattaataggatcctgatccttagtcgtaacaatctcaagttgacccttggcaccacccttactcacaagccatccccatccactcccctgaagaccgagcagctccgcaccaaaagccttaacaaacgcttcatgcgagccccagcgggaggcgatggcttcgctcagagcaggagcaccaccgaggtcattcccaggagtgccggggggagtcaagttcttccagaacagggagtggttaatgtggccgccgccgttgaagcggagtttctgttgcaatgcgatcagggttgggacatcatctgctgaagctgccgaggcttgagcggagagtgctgcgttcaggttgttgacgtatgcctggtggtgcttctgatggtgcaactccattatctgcttggagatgacgggttccaacgcctgtttattgttagtatggaagagattcgggttcatgatcggatggttcttacatcgtaggcgtaggggagagcaggtagagtgtgagacattgtggaattgtggattatgtgtgtgttgagagttgagaagagtgagaatggagagtagaaatgtaggcgatagataaaccaccaaggtccctggggatgcccctctctagaagtgacgtgatagtaagcatatgtcaagacctcgggaggccaccaaggtggatatccaccggtggatgtggacggcaattgggatgagttggattgagcacatttctcccaaagttgctctaacctgctcagtcggccctcgcagagtattcccggaattacataaagcaggtctaatccaccatctggtatctgtattatctcatacaatggtcttcctcgtttacaaagagagacaggggaactagccggggaaactgggtctctatgctcaaagtgggcttgagcaaagatatcatttacactaaacagaaatagagtcaaggttggacagcacgcattgtagaacagtcaacagtgtatacaaaaaagacaaataagaatgaagcaaaaaaaaaagataggccagcaggatatggaaccagaaggaaccttgaacaaagtgtcctcagaaaaatcttcactgaacaacagagagctatctctgtgataggttctaaaaattgggtcggagatgaaacagagctcctaatgaacaatgcaatgcgggcatcagctggacagtctgtttccacagacgtcagtcagaatacgcgactggtagagcattgttacctcctcagacatgtttcgtgccacaacctaacctgatacccacaagacagagctcgagatggtcgatgcaagcagcagctggacagtccgtatccacagacgtcagtcagaatacgcgactggtagagcattgttacctcctcagatatgtttcgtgccacaacctaaactgatacttgcaaagaccatggtaaaaaaaatcaagagcactccaggaacgaggtgtagtgcggacccagagtggtgtggagaagaaagaaaaaaggaaggaagtgggaggaggcagggaggtatttataccttcccagtggcttaaggcaaacgggtagttaggttgttgacgatttttcccaaaagggaaggcaccgaaccgggaaggttcccagccacccagccacctgcgcaccaggtactattcctatttgggtcactccatggtcatgacacctgagacctgatagaacagtcgctccatacacatattaccttaaatttgagaatcttggccgtttcgcgtgcgtgaaagagtctgtagttgttagatcatgcttctattcaaacgaagactcaaccgactactatcttgatttcaatatttattccagaatcatgttcaatatcatttgcatctagctactcagacagcctccataattgcagctattctgcataatcgtcatgtttaccatccagcgctgttatatctttgtgaaagtggcaaaatccctcgtttcttagagtatggctaatatcacaagaggaactatgaatatattcactttctccccaatctcaaggtggtttgtttacatcaaattctatcgaccaacggatctgcaatcctgtttgttctagaatccactaggtccttctagttcccgataatattggtcctccccttcctgccggctttgggaacagctctgggaaattagcccgccgccagttttccagtctcttgaactgcagctgccgtggcgtttcgcctcgtacattgggctgatccatcataatatcaccccctgcccccagcaagacaacacgcatctcatccagcgcttctctctcatcagcggatgtgggtatcatacatccatgcctgtctagaatatgtcctacgtgcagacaatggtgcaaggctgtatttcctctggaatctgtatgattgacatccacgcctctgcttatcagaaatttggtcgcctggacttgtcgtagattcctggccataagatgcaatacagtatacccatccttgtcctgttggttgatttcgacaccgtgtgatagaagaatatccatcagatggacgtcaatgggatcgccagctttgcaattggctgcaagcttgtgtagcacagtttggccattgttgtccactacgtctgcttccgctccgttctccagcaggaacttcaccactgtatcaaagtggtcgctcccagagcagcatgcgtgccctcttattgcatggtgcaacgcgttttcgccctgatcgtcccgcgcattgatatcactaccagctaggagtagcttcagggtatcgatgattcgatctttgacatgaacgtcagaaagccagcattcatccgaacctgggcccacggctgcccagtgaagaggcagacgcccattactatcgcgacaggatagggattctgtaatatcacttccccagtggtcaagaagcgttcgaagtgccttcgtattccaatacatgctgctgatatggagtgaagtaacactccatggcattctcatatcatgccaagagtgagatgaatggttctgctggaactgctccttagcgtgtatattgggcccttggtcaatgagtcttttcaccaacgcagagctggctctagaggaggctagaccaagcactgtaccaaatgattgtagtggtttgctttcatcactatcatctttgactgcattaccaccacagagtatcctagacgcccattcaacgtcattggcggggagttcaaccgcttgagcagacgcaccgctatcgaggagcaagcttatcaatttctcgccacgggcaattaaaccggtcctccatcgatcgagatcaatgggcgtctcgggtccgcgaccttccggagacaaatacgtcagagtccttgcagctgccagcagcgctttatcacggtccgattgattgaaatcgacggagtctggcgcaggctgcatatctaggataaactgcgtcgtctgaagatgctgcccgctgcatgctgcgctcagcaatgagtgtttccttcgatggagcggtttcttcattaaactagtcttgtagtagtgatccacgaggacacggagaatatcggtgctccctgcctccgctgagacgcatagcgggtcgtagcagaaatcatcttcattataaagattcaaagatccgtaaacagtgagatattgcttcagcctgggaacgtcattgagacggattatgcggtctagaagaccgcagtcccaggtctcgtagagtcgagtgccatctgtgtcgtgaagggcggtctcttccgattctagaatttcgttcctctggatatggaaagtgcagtatcgcatggtccagagatttttgtgaagtgaggcgagtgtcaaatgaacacaaagggagaaaagaaagactggaacctcttagcttagggaaatgtctccactaacgtagttcccgcccgagtgaaacaccccaaaacactggcttggaaagcgaattcgttcagatataaggcaggcttttcagtcagatggtcgcacaaagcctcgagcgtcaccggagtgatactacgcaactctcggaagaactcctaatatagactagtgtgtcttggcgtaaggggcaggaaagtcaatcgaagagtgtatagattactaatcccccagattccaagctccaagcggggtagggagagtcaacgagcctcggtcaattcggctggtgcaaatacaaatagctaggcccggaagtagcccacttttccctcaactcacttttctacatagttgagttcaaatccatacataatgtccgccgaagaacaagtcaagctctccgacttctccagcatcttctccctcgagggcaaggtcgctgtcgtaacaggcggttcccggggactaggcctacatgcagcctcagggtatgtatctctctagtaccctgccaattattcctgacatatcctaacatatctgaagcctcctccaagccggctgctccaaagtctacatcacttcccgcaagaaggcagcctgcgacgaagcagtcgctgctctcaatgccattcccaacaagcggcctggcgcacaagccatctccgtgccggccgacagcgcagatatgaaagagctagaccgacttgtcgccgaggtaggcaagaccacagaccatgttgacattctcttcgccaatgccggcgcaacatggggcgagaagttcgacacccaccccgagaagatgttctcgaaggttatggatttgaatgttaagagcgtgttctacacgatccaaaagtatgttatttgctagccggaactagggatgagaaggattctaacatcggatcaggttcaccccgctcctcacagcaaaggcaaccgtcgcagatccatcccgtgtcattatcaccgcctctgtggcgggtattggcattggcgcgatcggtgagcacgcaacgccatcttactctgcttctaaggcggctgctatccatctcgcgaagaatctggctgtcgagcttgggccgcgtcatgtcttgactaatgctattgcaccgggattcttcccctcgaagatggctactgggcttattgaggcgaagggtgggataaagcatctggaggagttctcgccgaacggtcgtctcggaaagcccgaggatattgctggtttggtggtcttcctcgggtctagggcttcgagtcatttgaatggagcggtcattgcgacagacggtggagctgtgatcaaggggagactgtaaatgtttgatttgtggctgtaaagacggtatagataggtgcccaggtgttctgctttgattagtaaatatttgatatctcactagccaaaaggaaccgatctgttcatgtagactttcgagacctcgggtactacacctttcgcaatgtctgggccgaggcgggtgttctccacactccccgcattaaaaaacacttccgcgcctcgatgtttctcactacatatccaccatggcctcccaggaaccccgttatgtggcagttgctcagcgcaagcaagcagaccttgctgcagctatccctgcagaatggcgcctgccctcacacctcatccctagtgggatgctctcaatctccgagtcgatcaccgttggcccaaagaattacgagcgagtcggggtgatggatattccacgcacatgtggtatacttacacctaaagagttggaaataacagagaaatacgatgtacggagccttgtggcagaaatgacagaaggccggttgaaggccgaggacgtggtgcgagggttttgcaaggtgcgcccacacgccgattatctccgttcgaggcactaatagatctggataatggcagagagcagccgtcgcccagcaactcactcgctgtctaaccgagccgctcttcgactgcgccttgcaacgagcccgagagctggatgatcacctccagcgcacgggcaccccgataggccccttacatggtcttccggtgtcggtgaaggacacatttaatataaaaggcgtggactcaagcattggattatccgccctagcattcaagcctgcaaaagcgaatgccccgctagtagatctgctgcagtctttaggtgcggtagtgatcgccaagacaaatgtaccacaaacactcggaacattggatagctgcaaccaccttttcggacgcacgctgaaccctctcaaccgtaaatggacagccggcggcagcaccggcggagagggcgcgttgctcgccatgcgcgggtctatggtcggttttggcacggatattggtggtagcatccgcgtgccagctatgtgccagggtatctacgggttcaagccgagtagcggacgcgtgccatttggaggccagcagagcggccagattgaaggtaagggccggatagggttgcaagcagtggctggcccgttggctcgctctgttgcggatatcaacgccatcatgacggagatcgtcccacgcgcggagctgttcggcgaagattgcattccggggtcatggtcggtaccagccataccgcttgctcccgctcctcggcacagctttactattggtgttctcaagactgatggtctggtcacacctctacccccgatcacgcgaattctgaacgaagtcgccaacagcctccgccgtacccccggcgtcgaggtcgtggagattccgcttccgccggtcctagctaaatgccaagccctagcgggtcggctgatgggcattgacgatgggtcgcatatgctcgacctgattgagagcatggacgaagacctcattccctggctgcaaggtcgaatgaagcgcggtaaggccttggccgtggttcaactggcgacgctgcaggctcagcgctctgagattgagagggaaatgatgaagatgtggactttgtcgtcacaggctccgtctgtcgtccgacgcgttgacgccataatttgtcccgtggcgccccacccggtgccggagatggaccgctacaatgccgtgggatacacctcgacctttgtgctgctagactatccggctgcctcggttcctgtccgctcgttcacagaagctgatctggagattgggcgcgaaatggaggcaccggtgttggggagttgggataaggccaatcggcagctgtgtaagttccaatatgatatataggtgatatttcgctaacttgcttcggttacaggggacgagaaaacggttgaccgtcgagtgtacctcgggtcgcctctcagtgtgcaggttgtcactcccaagcagcacgactatcagcttttccaggccatggagattgttgaccgggctgtacagagcgggggttcagccagtgcgaagctgtagccattgcaatgtgtcatagaaacacgacaaacttttgacgtgatcacatgggcccatcctatttacaaaagtcttaagttgtattcgtaggaggcaaatatatgaagaaacgccaagaaacaaaaggattcgtcgggggcgtcggctcaatgttcgcaatgcgcattgacctgattcgttgacttggagaagtcaagcaggtcggccaatagaaatcaattccattgggccagaaccacacaacgggcgataagcaatgcggctaacccctgacaagactaaagccaatctcgcgatgctcttaattatggcgccatcgtcgcccatttaccgtctctggcttggccgtccacgataccatgttaacgctcaggccaaaaaaaaagacgcgaaaaaataaatgaaaaacagggttcgaatccacgtgtaattggtctctcatttgtttataacgtagagccgatctcgtgcctattgtagacttgtcttcttcctatcacctatcacctccatttcacccaacatgtccaaggacgacaggaaggaaccaggctacgacctgggcagcactgagaccaatggagaatatttcgataccatcactgctctggtcgctgcaggtacggcttcaattgtgctgggttgtggttatcggactgagctgaccttatctttcgttcagaccatgagcatgaaatcaagcttcggaccatgacttggcagaagacggcctgcctgcttgccggtgagcaggtttgcttggccattatggcgcagacttggtccctctcgtgagtaaccgctcgaatatctattctcaatgaagctgacggtgttttcagcgtcctcggatgggttcccggtatcattactatggtcctctgcggattcttcttttgggtgacctcgatcacgatgcataaatatatcatgaagcatcctcatattatggatatctgtgagttacagtccgatatccttatacttgcagaaaactaacagcttaattcccaggcgatttcggataccatgtattcggacagagcaaagttgcctacatcttctccgcattcatgatgcttgcgaacaatattctcctcatcggattccacgtcttgaccggcgccaaggtcctgaataccctctcggatcactcattgtgcactgccgtcttctcgataatcgtgactatcatgggaatcgtcatgtccttcccccgaaccttgcaacatgttagcctcatgtcaatgttctcatgtgagtagctgaatcccccagctctcagatgtcccaactaaccatttcagccgcctgcatgggtatcgcagttattctcttcctcgtctacgccggtatcgaaaaagcccctctctacggatacaacggcagctacccgacagacggagccgtgaggacctatgccttccctctaccaggcaccacatgggtcgcctgtatgaacgccgtgatgaacatcacctttatctgggtgccgcaaatcctgttcccaaccttcatctcagagatggaaaggccgcaggatttccccaaagcattggccgttctcggcgtgatctccgcgatcctattcatcgccccttcagccattggattccactacctgggccagtattccaccgctccagccttcggcagtttgggcgtggtgtcatacaagaaatcgtccttcggcttcgtcatcgtccccaccctgatcatcggcgtgatctacgccaatgtgactgcgaaattcctctacacgcgcatcctcggcaagtcccgacactcgcacagccacaccgtgcttggatggactgtgtgggtgttgatcatggtagcgatctgggtgctcgggtttgtctttgcagagatcattcccagcatgggtgatttcctttccctcctgagcgcggcctttgattctttcttcgggttcatttatttcgccgtcgcgtactggcagctcaaccggggatcgctgttcagcggtctcgggaggaccgctaacactctgctcaatcttctcatcttgatgattggtctgttcttgctgggtccggggctgtatgcagccgttgaggccatcatttctgactactcgggttcggtcgagcctgcctttacttgtgccaatatggctatctaaggggaagtcatttaatagctttttatgatcggatgggtcatttgttgcgatttttttatgttttatgatgacttcaaaagaaaagaaatgaactggaatatcaccagccggtgaaaatccaggtttctgtctatcttttatctgtagagtccctgagggcaactacctctcaattccctattccaccctccgcaacccgggataagtataaatactaacaagcctcggccctccagaatgccctctcctcgccgataaaagtactaacaccaccatatctactaccgccgaatacatcgacagcagcactgggacccacaagggaagttccgttaaccgttaacaccaaccaagcaccgatcacacgagccaggatatcaatctcccttaaccctccacatcaagtccttctctctaacaagaagcaccagctatatgctcatacctcactggactaagcccgcattaatcaaaatcggaatcgcccgatcctcaatccactccgtgcatttaaccaacggccgacgcggctccccaggctcataaaacaccaccggatcccaactcttaaccggctccgtcctcatcgtcactgtattaaacgccttctgcttcggcggcgcgggaacagaactgagaatatcgttccagttcttcgggtagttgagagctcgcgtatgtccgataagctccttggagaagaagttctcgtctgtttctgggtcgtcgtagctcacgggctcgtagtgcatgcctgtgactatgtcgcccgtgacgtggtgcttcgtgccgctgcctgggccttgggcgtttgtttgcacgaagaggatggtgtggtagcggggtgagggcatgtctgggtcttgcattgagaggttgagttttactttgtagactgggtagatttgggaggttgacattttggtgggagtttgaggcggatggagattgttcgaggactggcttgtggtttgatgctgagatcgtcctttctttaatgcctttctttctccccgctttttctgctggcaagtttggtatcacgaaatgcagctagccgcccaggcggattggaaatagtaatgtatctctctatttagtatgagcggttaagatcttgtctgacaatcaatgttggtatttccaatatgtccagtctagcggctatccttggtgcattcttacccctcactttcgactacacactcgagaattcccagcaacaagcttatcgccacagttctccgcatatagagaagagttcatttgtcttgctttccttctgatgctgctagatcagaaaaaaactgttgcggctcggccagggtcgttgaatttgcggctgcctagccatcatcaccttgaggtccttgtccgaggcttttgcagaggtcaatctgctatagagatcaatatcccgtatttgctctggccaggattcatggcagcgacgatgggtggcccatccttcgtagtagccaacgactctgtccatgaagaaatctttggagcaggtctcttgtttgaacgtcaaggttttgttaccgcactaagacatgtcagtcgatacctgaaatatcgagatattggggttgttcaactatagctctaatgcttgggttagtatttgttcacaacaccataggtgctctccgagtaaatgcgctagtagagcgtctttgttacatcgacgttttttcaaatttcacttgtagtagcacaaacttcgaactattcaaactccaaaaaaggggcatcaatggcaacagattaagcgtcgaggctctactggttatagttcagctaggttcgtgtgatggcaagaagagtcagggcattttcaagtctcttttctctaatcgatctagtagacactcgcaaatatagaattgagttctgttaaagcagagggttcgggcctttccggagaagaagggatcaaaactatgaaaatgaagctaagcacttggcgtcggtaaagagggtctcaattttgacatggaatatccgaggcgatgccgccatcaagtactccgtacctcgcctaagattagctcggctctacagaatcttccgactgttgcttcggcttcaattttgaggcgtgatggtaattttcgcgtggcaatcatttcggcatctcagtatcagaaggtctgactcatttctcaatgcatgccgacgttgagtcgtagcttcctacaccccctccaagatgggatcttcaataatagcatttcaatagccttcgcggatcaactcagcacatgtagctacctctcggggccagctgcgctcataaaacgccaggtcagccagacaggcttggtcgaggttttcaatggctctggctcagtcttcatcgtatgtgctgccatatgagctacgatatatggcccatccccacggccaactccaccccaacaagattgaaagtccaagaagcctggatacaaacttccaccctagttttgcgtgttgtcggttgcgtcgctcaataagagtttctttgggtggaaactcaggtgagcgctatggtgtaggccatgacttgtcatgagatgtacgagtggatggggattatagcacatgatttggcgatgttgtgagtaaatgcatgtggttgattggaaactccaggtcttgcatgttctttttatgtctcgcttacctcgcgccggggcgtcgagtccttcaccacatggactgatttatgttcagaaattattgctaagctgttgagtggtcaaaaagagaataagaaactaatcacctattgatttcatctccaaaaataataaaggaaatagggtgttaattgcatacaattggcccggcaacattcttcacctcgaatcatgcgcattcccaacacctcccctcaagtctactataagaatcattatttccttgctcatacgcaaagagatgtaacagatgtcttttaaagaagcctgtgccgtgtccacttttagcccgttgcccggcctccactctagccccttccaaccaatcttgacactatcattgtcgagttgaacaaaccactcaatcgcatcagttttggcacgtaactcaaaatgcggggaatgcgatggcgctcgtgaaacaaatatattatagttgcatccgctataattagtgttcgtgttcctcgtgttgttagtggctgctaggagagtatgaatgcagggtcacgaacttacgagaaaggatcaagcaatatcccagctagtttgtaatagattccttgaaattgttatttttgtaaataattttggagatctcacttgtttggggtctataatgcgaatgccacggcgatcgtgttggatcagagggtgaaatacgagtgaaggctcatttcctcctgcaagggaaatacgaagacagaaatagcatgtagattttctcatagcatagcgtgaatgatttgtctataaagacttcaatgttcatcgccattcggattcctcttctccaactcagcccttctaaaccacagagaacaagaactctctatcacaaacaacaaccaaacaattcatcatgcatttcatctccctcattgccttctccctcacaaccgctataacagcggtcagcgcctaccccatcaccggcgacaccgtcaactgccgctccggccctggaacaagccatacagtcgtcaagacatacaaaaaagcccacgatgtcaaaatcacctgccaaaccaccggagactcaatctccggcaacaacatctgggacaagacctccgacggctgctatgtagctgactactacgtgaaaaccggcagcaacagctacgtaaccgccaaatgcagtagcagtggcagcaccagcagcaccggcaccggaaaagccatcatcgccgcagccgagaaggagaaaggcctcccgtacgtctggggcggcggtggttgcaagggtccctccggcggcggctttgactgctccggtctgacacagtatgctgtctgccaggctttgaagaagacaattccgcgtgtcgcgcaggaccagtataactccagcttgggcaagcggtatcctcgtgcgcaggctaagcctggtgatctcttgttctgggctactggtggtgattgcaagaacaaggttgtgcatgtcggtatctttatcaatgataagacgatgattaatgctgctcacactggtacgccggtgcgtgagcaggctatttggacttcctatggtggagagagtatctgtccttatgttatgaggtatgtatatcattcttgggttttgggttgtcatactaactggtgtatagattcacttgagctttgggtatagctggttggcttgaatttcttttggagattccgattgagagacgattcctgggaaattcagatatttgctggttggatttgtgtgatactctagatagaatgttgaaatggccttctatcttcttcatctattcttggtagccaaatacctaaggtgtgtaagtgtcaattgaaaggaaggaacttatgagagatgatattgggaaaatggacatgtgacatttgcgattcaaggaaggtgcggtggaactatcacaagttaggaaggcaaggtttattggttgtataaaaaggtccctcctccccttcctcttctcttcttcctcaccccatccttctagccaccatttctccgtagcctcatgagacagcgcaggcagagggtctcgtggcacctgctgcctaagctaccacagggactcatgtatttgatatgtaactccacaagtgacggctctaccttgaaaactttttatgttatagaaagtcctccctatgaatgtagcaaggaaatggatattgatatccgcagattcttgagccagttgagaagcccccaaccccaaatataccggagatgaaacgtgacactactgttcataaaatctctctgcgattacctgttgaagaagccaacattttatgtcgatgagcttgctgctttcctctggaatggtgcaaacatagattcagtctcccaattctctttgattgtagcatagtatggtccagccattttcgactcgcaaattgatgatagaaagaaaatcgaaatctcagatagggcgtgttttccgtcaacactgttgaatgtcacgctgtacactcacgtaactcgatcgatagaccgaaaaagcagttcactctgtctttaaatagcagacaatcctcacaaattttacggctgggagaggttatcagaatacttgccccacgcaaagtagcttctggctccattgttgaaatgcggttgaggcgtctctgaagtgttttcttatcttcccaaagctgtatctgaccctctcgagcctttaatttccggatttcgggacgagttccaaggagggcaatctcatcatcaacaattgacacttcacgtttcaagcgctggaccagtgcctcgtcatattcgtccccaagtaatcgatcgtctttgtcaaatagcttaaattcaagttgctttctatcatattggagctgatagagtcgggggatgctagggtatatagactccagttccgatattttcaaattttcatctgcgatttctttatcaaaccgggagtcaagcttcttgtcctcttctagaaaaacatgtcggtcgagaaaataagcgatcagttgcttttccgcgtgggacgcaaaaaactgtccctggataccgtggtccttgcgagcatcaacagcgagagtatgaccaacgatggtggctagtttcaggaccctatcagtccaatccttgccgctcacccgtgttgaaggccattgtgagtgtccccagccactcattgccgctatagatgggaaaggaatgcccctttctagcaaagcaattgtcttgtaagatgtagatatgggatactgtcgaattggaccataaagagtgaccgattggccagtagatgaccttctgaaggagtgagaggctgtgtcgggatattgtagtacgagatctgccttggtgtgcaaatctccctcgtcaaggatgcgcgcaatctctcgtcgatcaatatctcggttgacgacatcttccttgtatattggctctttcggatcgccccagaccccacccccaaccgtgtgcctttctttgcggttcttatgagttggtttggtaagattcagggctcgttgatttttgttatcacgcaatgatcgatcggcaccccgagaaagcagtatctttacattctccagcctaccccaaaggcaggcttccataagcgcagtccgcccgttcttgttcgttgcgttgactcgagcgccaaagtcaaggagcaaggagatcatggatgatgttttctctcgagaagccataatgagacatgtatctccgtaataatctcgcccgtgaaggaaaatgggtttgtcgactgattctgtaaggtaatgcctcacttttgatgtttcaccctgggtacagttcgatatagcgaaaagtatgcgacgttcctcgaagggctcttctccttctagtgggatggtgattatctctttggagtcctcgaagctgatctcacgattgttaaacccacttggcatcctcgatagattcatattggacagttgatcagacaaaaatgactcatattcggaactggctaatgcttcaagagcgttgatattgataaaacgtgctctagctttgtcaatctcataggcaacaggaaatctgtaccgatatgaaggtcgaggaaagccacaacgcgatacatgcagggcactttcgtaggatctaaaccgatggtgatggagctcctcgcaataggggcatttgaggtagagataggaatccgtccaccaaataacatcgacgagaggattggcttgagtgagggacatggtcctctgatgaaatggtaatatgggacgctgtggttagatagtcaaagaagagaaattgtgactcagaactctgcggaaggttagttagttatatcattttacaccgcattacgaatgacgaaggaggcggaaaaaaatacgactcgcaatttagagctcttttcaatacggtctgagtcaggttgggcgcgagctgggagaaaactcaagtgccattataagcataactctatgtactaatgtgtagtatcgtacgcagactgtgatgctcagcgaaagtgcgggagtgcaggccggcgcgatcttgctatatcaccagaactaccgatagagtctatgcttccatgagaattacagtacggtgacaatgacggttgtcattttccgatctttataaagcgggggcgggggtgtagatggccgtagccgaagacgcgcaagtacgcgcagcgcgtagtatgaacgcgcaggtagtcatctacacccagtctacgaacaaataagcttgacttggacttaatttcctcaattctatttttatatgtgttctatctagggaatttaaaatacaagttctgtttgaagagcttcaaaatcttgaaacatcccgaccaaagaacttattcactgtccatcggaaagccacacgcaacttgttgcgccagctgatagacatactgatgtatgccatcttccagataagtgatgcagtacgtcccttgataccatctggcaggaatcgcttcggactccggtcagcgttacggggaatctgcatcaacgcgcgttcgtcaccgatgtatgccatggtgccgaggtcgcggaaagagaacggcggggtttgaccgaggtcattcttgttcaaacgctcagcgagccacttcgcttcttggtaggtagcctgtgctgtggcagggggggcaccggtctctggcatggcgttgtcacctaatgcgaacacgtcgtgaagaacggctgtctggcctgtttcgttttgcagctgtacccgcagatgtccgtcgacgagaaggggtccctttcggggggctttcttgaatttccacgctgcgtgttcggcgtccacggctttttctgaggtctcgatgctttggactgagtctgcggggaatgcatcgactgtgtcaagcgattcggtgaccagttttgtcatggcattacccgttgcccaaacacacattccaatgccttgctcgccgtcttcttcggtgtgaagagtcagacagcccttgggatccatggggtggggcccaggtgcgccaggggcaccccagcgcaagcttttaacatgatatgaggtcttgatatcaataccctcgctcttcatggtctccatcgcgtagcgggaaagcgactcgtcgaacatcgaaagcaccttgggtgcaacatcgtacaaagtgatcttcggcaattcatgaagactggggtatagcaacatcatatcggagtagatgaaatcgcgcagggatcccgcaagctcgataccggttggaccggctccgacaatggcgaagttcagcagccattttcgcatctcgggggaagtggttgggaggacagccagctcgaaacattctcgcacgcggcgcttgacacgtttggcgtcaccgatatctttgaaaaacatggcattctcccgcacaccgggtgttccaaacgtgcggctgacggcgcctaccgcgatgataagcttatcgtagggtacctcgaacacttctccctgttcccattgaagatgcggctccatggccggcttattcctcgtttccgggccttgctcggttattcggtaatcttgggttgtgcgaggagactcggtgacaccacttttgacgactgttgattcgactaggacggtctttcttttcaaatcgactgaacggacagctccttgaaagaagtcgactttggagcgcggatcacgcacgggctcgacaatgctggagaaatcgagagatccgctggcggtgttggtgaggagaggagtaaagacaaagtatgagcgaggtgaaattatgagaggtgcgtatttctttgaagaaagcttccgcgagacgttgtaaccaccccagccagatccaaggatgacaactcgttccctgccatcagactccttagccaaggcgggcggctcagcatgtgttgcgaggcatctcctgcttggtgtgccaactaccagggcagtgctagaaagggggagcgaactccgtacacgtagagcctcgcggcgaagaggaatcatggtactcaatggccgaatttgcatggtaatgcagaactaacgcagtgtatgtcagtagatcgagggtattatgttcaaaaaacagatctgagctactttgtaactcctgcgatgggattggtgctcgtagttaaggaaggtttcctcttccgctgacacatcgatgacttcaccgtcggcaggaccggagcgggcctggtccactcggtaggatccatattctatcgggtactagtgccgtagaatgcaggtgggaattgaaaggctgctattactgatccatctatcaagttcgtggacacccggaacccttcggagccagcggtgataacgggctgcacgtgccgccggagacgatagggaggtgccagtacatgttgttcattcggcaccgaaaggtttggcggatgtctataagtcgagcaaaagcattccgagggtaacttttgaaaaagaggagaataccgccgctatatgagttcgcggtgagtgtcatatgattctatcatatgatgggggttgacctcgggagctagggcttggcggaatcacatgaatttgatacaaatgtagtcccgagttatttaaggatcaccgagattccaccggcatggagcttggacgctcccgagattccaccgcgtcgaaacttccgtgtctccgagcttctaccgggttactccttagagcttggatgcagatttggttttctaggttccgggttgttttctcgcgttgtctcccccttttgttcgaggactcccaaggttgacagctgcccaactcatcagcactgcggagagggccagcactgcggaaggagggtctagttcaaggcttgtcccggtcataacacgtctagaaagcatccgggccactgtcacgacattgaagcggatcggtcggtccgttcgcatcaacggggattccaaggttatcatgcctccctttggcttcacttcataggcggtgagaaacgcgatgacaatagctgacacatcgtgcgtggcgtcgtgtggcgcagacgtgtatctggagtggcgcggccctttctgtgtcagaatctcggatttagggggagactacctaatcgggatgttctttttctccgctgttctaccccatgtatctttattcgcccctccgagctttaagttcctcgaaggtacggagatcatcgtttaattcatcgttatcaccgatatattgctccattgggatgaattctcggccccgagctctgctggcgtccagcaggttaggcagcgttgtacgtatacttccagggtggcggtttacatggctgcctgagtgtacaaccagttgtatataaagatcatgttgcttccgtgcatacctaatatcagatcaagtgtcttcactgttcttcgctttactttctcgccttttgatatcttccaacgtatcattttctcgcgcaagtcacatatcttacatcaaacaactacttcaagatggcttccatctaccaactcaaccaacctaccagtcagttttgggactttgtcaacggcaatctagaggaccatcctttctttgctcctcgcggccaccgcggacaccacggacgtcgtggacctcgtggatgggataccccccagcagagcgacaataccaaccgagacgctcaagcaggtgaaaccactgagcccaacgccgacatggagaaggacgaaacgtcagcatcggactctgactccccagacaacaaccatcgctgcgaccactgcggaaatggtaagggcaagtacggtagccgtggaggtcccgaccaccacggtccaggcccattccgtggcagaggaggcaagggcagacatggacatggccctcacgctggcccctacggccaccacggccctcacagcaccaaggaattctcacaggactctgaaacaccccaagcagtcggtgagctggccgacgcctctaaagagaacatcgaaacctcggcatcggactctgactctcctgacaaccaccgccaccaccgcccccgccccgggggnnnnnnnnnnnnnnnnnnnnnnnnnnnnnnnnnnnnnnnnnnnnnnnnnnnnnnnnnnnnnnnnnnnnnnnnnnnnnnnnnnnnnnnnnnnnnnnnnnnnnnnnnnnnnnnnnnnnnnnnnnnnnnnnnnnnnnnnnnnnnnnnnnnnnnnnnnnnnnnnnnnnnnnnnnnnnnnnnnnnnnnnnnnnnnnnnnnnnnnnnnnnnnnnnnnnnnnnnnnnnnnnnnnnnnnnnnnnnnnnnnnnnnnnnnnnnnnnnnnnnnnnnnnnnnnnnnnnnnnnnnnnnnnnnnnnnnnnnnnnnnnnnnnnnnnnnnnnnnnnnnnnnnnnnnncgggcctctgccccccctgacacccccccccccccccgccacggccgcggcggaaaattcaagaacaagggccatggaggtcccggtcaccatggaccaggtcccttccgcggcatgggtggtaagggaagacacggccacggccctcacgccgggccttatgacttccacggctacggtcatcgccctcacgccggaccttacgacttccacggttacggccacggccctcacgccgggccttatgaattccacggttacggccatggccaccaccacggtgccggtgccttcggaggtcctggacgcggtggaaagggctggcatggacatggatacggacacggtccccacgctggaccatacgatttccccggcccccaccacaacggtggacccttcggtttcgggccccgtggacagggtcacccccacaaaggaggccgcggcagacacagcggacctccacctcctttcggcggtccattcgacttcctgcgccagcttggtgcaggacttggcttccctatgaatgcgcctaccgcagagggtgttgacttcacgccctccgttgacgtcttcgatacccccgccaaatacattgtccatgtctcacttcccggagctaagaagagcgatctcagcattgactacgacgctgatgagtctgttctgcatctgtcgggtgttgtctatcgccccggtgtcaatgaggatttgcaccaggctcttgtaatggaagagcggggtcagcacgttggtgtctttgagcgcgagatccgccttgggactcgtgttgtcccggctttgattattgttgatggcatctcggccaagttggaggatggtgttttgaatgttactttgccgaaaattgtccaggaacctgaggttgggaagaagaaggtttttgtggaggatggtgccttggagaatgagaaggacgccatggtcgtcgatgagaggactctcactccggtggagtctgaaggaagcgaagttgacgatggtgagaccagagagtatgtcaaggttcctgtgcagtgagcacaggtcgagtttctgggtttctgagtttgagtttctgtgattttgggtcaattggagttggagttatgaatttttgatttcccttgtttaatatttgaaattgttcactagttatgggataataaatcgctgctcaaggtcgagtggcagaaacaccaattttgctcgtgctgtaggctcctgtagaccagagtaaatatttatcagtatgtctcatttagaatgaataaacagtctagatctagaggaatctagttcaggttcaaggctatgggctatggttcgatggttattgtcacgccgagtgctgtttcctaatataaagtccaaccgtgttccccaattagcatcaattaactaaatttctctcaatattcaactcgtcttattccaagtgatgcatttgggcgcgttcattgttaacccatgcacttcgtaaacctctctgtggcattccttctatttcctttatctctcgcagacagcttgccgttcagattttcctttgttggcctgcagggatgcttcttctactttttggtggatgagatctgatggagctatatagagagcttcatggcagtagctcgatcctcatcatccatccacttcaatctccagatttctggttgatcatcctttttcctagtctgaaaactatatcaccacgatgtctatatatatatatctgaggatacaatatttccctttcagccgctgtcatcctcaccatcttctccagcgctgcgactgctcactacaattatcagctcatcaagccaccatgctgccagcatcgtgacaaccaaaaacccaacccggactaggttgggcccggagtgaagtaccagcatggtgctagattccgcacccaacgcattgggatcggcagaataggtatgtcacggttcttgttttactctgtaaaaacaccactaactctcaactcacacaatctagagctagccttaaagattccctagcacagttgactctccgcgcatttgattcggcgatatacctaaatcctaaggacacagacggcccagtcgaccttattcacatcgctactattagccgcggctagaataagaccccctatcgcttccttataaatgaaaaccccacacatgcggagcacctgagcttgatgtcaattaagaggataactacgcccctagtgagaggagatatggtctcttttctcttacattgcgatggtaagtgaagcccctgtcaccaaaaccggaccgtaggcgtttgctaaccacatctcatcttagatgagcttcatgtatacaagaggcgggcagaaaacagcccaaaccagataaggggcaaaataagtacaatgccgaagatgagcctcgccttctgggaagcgtccaaaggatcattgctcgagtccatctggtgagcaaccgacagattcttcctcgtcggaagaagctgcacccagagtttcggcacgtagtaaagcagtcagggatgcggtatgttgatcgagatgatctgtgatatataatgctaactttacatatttaggtcttggctcgagatgggaatagatgtgttctctcgaggttcggtgtacatgggttacatgtatctcacattcttcctttcgagttgaacaatggctctatgcgtgaaacagactcgaacataaccttcatcgtccagttcatcttcttcggcttcttcgtgatggttgcaaagagcttgcacttccgcatctcgcgtcagtcaatctccagatcgcagtcagatcgtggttgccgaagtgatccccgcattgatggttgggaacttaaagagcgacttatatgatccaaacaaagcctagtccggagagatctggatgaatacccgcgtacgagcaccaatcgattaggataggacatagcagcagtcgaaatcgacaaagatagagtacggcccgtgagctcttcatgtacatctttgatggattgtcggtgatctctgatacctttgacgagcatatcgaacatttaacccttgttctaggtgtgcttgggaagcacggagtctccttggaacccaagaaagcctaggtcgccttccccgaggtctcacgtttgggccagcgggtagacgcgttaggtatgtacgccggaagacaagatcaaagccattgccggtctggaatttccccagacgttacgtcagctggagacatacctcggtatgaccggcgctttgcctcaatacgtgcctcactatgcgaagaagtcagaaccgctccaggtcatcgacattttgtgtcacccgaggtgatgcatacttaaatgaacttctcaattctcatctgaaacttaatcacttttaacgctatgtagaaaacgggtatatgcaacttttgcctactcgaaacagcaaataatcacaatatccaatcattagatgccataaatcatatcatcgtaatctggagtccatactaggccgcaggtcgtaacttttccgcatagtgccattgctcaatccaccatatagatcaggccgcctcgaggcccccgtgccgcgtgtagaaacaggtagcagaccaccaccatattccacatcgacactcctcctcatgcgcggtaaactcataattttctccatctccaaagcctggagcgtttcctcgcttcgttcactcttcgcagacaccttcgcccggttagacaaccagcgtcgactgcccacgcggaagaaacccccgatatcatcaacggtgagagcgacccagacaagcgggatggagattgcaaagccaataccaaaggtatactttgccacatagccgagattcaagctctcgaattctttcaggttgatcgtgaagatggaggcgataaacgacaacggcaggaagacaatagtgacaatagtgaagaccataattgtcttactctggcgggttgtaccggcagcctggtcacgggcgaagcgggcctcgaacgcgttcgcgtgtttctgtttcagatcgagcaggtccgtgatggagtggtagatgcgctcggcttgtttatccatgcggtcaatatcctttaggtgcatgtcgatcatgcgctgctggtctttgaaccgtttcttgacttcgaattgggaccggtgctggccttgataggtctcgcagacgacttcttggaagtcgagcaggacgttgttctggtgctccagcaccgtccggatcatgttcagctcgtctctgatgtcctttgtctccgctaggagattggtttcctgtccgatgtctaggagtcggtcgacgaatagtggctggccgtcctcgtcgcagtagttgctgctttgatcttgctcgtcggtcccattgtaggactttggcggagagctgaaggagccgttcagcttgcggtgacttttcagccactctgatgcctgcccggaggcgtggttgaattggttaaaaagcacggtctctttgtccgtggctatacctatagatgactcgaacatatctaggaactggtactcctcgtcgcctaggcggtgtcgatcgaagacacccgagcatcgattggtgattatcatggctagatcatagacggatttgacagggtcgcgggttttggaattgatatcctcgataatcccatccagcacattaagcgggtcattcttgggctggtcccatctctgcgggaaggccgttacaatcagattcgtgcctagaacccacatccagagttgatccaccatgaatatcttggggtctgcccccattccggggctttttgtttggtaccggtacacaacttggtcctgatcacgactcttggtatcgatattcgggtagaaaaactggtccagtgttcggcggacatggagggaggtcgttgaggacgatagatgcgcatatatgagtatttcgtctcttgtgcgcgttctctttatccccctgggtataaaatcaagcgtttccgctcgggagattgcatcctgcatctgttgtctgcgctctgtggtctcgaaatgtagatacggcatgaacacgcagacattacatgcagaaaccagagggtgagggtctttgcaaaaggttgatgaagacagtgatgacctctgtttctcgccctggcccgacttccccttcgtctcctgcttgggagtccctggtacgctacccgacttgccgcgcttcggattgttcttgttcttttttccatgcccttcgtcgtgaaaataagaatccgccttttcaggcttgctgcctgtgcctttttgcttgcgggcagggctatccatggcccttacctgcccattctcagacgcaggctcctccggagtctcctcttcatgtcgacgcagcatcgtccgcggcgtattctgacacaacggtcgcataaagtgcgaatgagtcctttgaccccgatgctgatagttgaaagacttctccagccccttgaacccatcaacatcatgtgcgccctcctcaataaaggacttggtaagcagagcttccacccacgccatattgttcgccggtaagtgaatccaccggaaatcagtcccacgactatcaaccggcacagtggtaacagcctgtttcctaggattctccggatccctcccataaagcagattaaataccgacatgcgcttaacccgattctcattatggaagtttccaaagtcaacaacagtagcatcgaacgccgcacaagcctccttgacaccatcagatagactgtcgacattgttaaacggcgccagcaacagcacaatatccttccgcttgaactgcgccgcacgcagaaacggcgtactgccaaaattatccctaacccgacgtttcagatcaggcttctcaagaagacactgcacgacctcgcgatggccgccctgcgcagcaagatgcagcggcgtaatgccattcaaaagctgtgcgttgatatgcgcgccttcgctcagcagaatccgcacaatcgcctcacaccccttatcacaggcattatgaagcggcgtccagccaccatcactagcagcattaaccgccgccttgtgcgcaatcagcagctgcacgatatccgcacggtcatgagccgtagcaacatgcaacgccgtcttaccacgcagctcaacggcatcgatctgcgcccccagcccggacccccgcacctccccctctttctccccctcgccagcattcctcgtcaacaacatctccgccatcctccaattccccgtcgcacaagcccaatgcaacggcgtccgccccagctcatcctgccccgcaaccccatcaatagcacactccgtccgcaacaacaaccccacaacctcctccccccacccccaccgacaagccctatcagcggcgaggttatgcaacgcgttccggcggcgcagatcgcgctggttcacgtccgcgccccgcatgataagcaggtgcaggatatcggcgtggttcttccacgccgcggtcatgagcgccgtgnnnnnnnnnnnnnnnnnnnnnnnnnnnnnnnnnnnnnnnnnnnnnnnnnnnnnnnnnnnnnnnnnnnnnnnnnnnnnnnnnnnnnnnnnnnnnnnnnnnnnnnnnnnnnnnnnnnnnnnnnnnnnnnnnnnnnnnnnnnnnnnnnnnnnnnnnnnnnnnnnnnnnnnnnnnnnnnnnnnnnnnnnnnnnnnnnnnnnnnnnnnnnnnnnnnnnnnnnnnnnnnnnnnnnnnnnnnnnnnnnnnnnnnnnnnnnnnnnnnnnnnnnnnnnnnnnnnnnnnnnnnnnnnnnnnnnnnnnnnnnnnnnnnnnnnnnnnnnnnnnnnnnnnnnnnnnnnnnnnnnnnnnnnnnnnnnnnnnnnnnnnnnnnnnnnnnnnnnnnnnnnnnnnnnnnnnggggcaggatggcggggtgtttctcccccgcggcggtcatgagcgccgtgcggccttctttgtcggcggagttgggacaggcgccgtggtcgagcagcagacggacgatttcgtagtggtcgcgctcgacggcgcggaggaggggtgaggcgcggttggaggggacgtcggttttggcgccgtgcgtgaggaggtattctgttgcggcgatgcaggctcgttcggcgctgcgcattaggccgatgcggaggaagttgtcgtttagttggttgtactcgtgggcgagggctattgtcttttttagggagtcgatgtcgttggattcggcggcgcggaggagccgtggctccaggcgctcgtggctgtcgcttgttatgcttgaggctggcattgtggttgaggtgtgtagtggtgagggaattgcggtattagattatatatatggctgtgtatagatgtatagcgtgtcgttaatccattgctgtcgtttcttggtgagttattgagactcttctagttttccctccccggtaggataagcgtttggagatggatggggaggagaacttgggacaaagctagacttgaatgaatcaagctcaagcgccagcagatggcccttttcccggtctggaaaggatctgcggacctgaaagtacttcgtttcctcagccccaatcctatgggggattttgtaaccgacggcgaaaatgaggctgtgtggctgatccgctcgtatcgcttgttttagtaggtttggccccagcatatgcatgtttcaagatttgactagttggatcctttgggaaagacgacagaaatttctgtaagagcaggtaaatccagggtatggcagccttggaaggtccaatagaatgtatgttgtaggtacggagtagagcctggttaacatagaattaagaatctggtaactcaagccgtaaccatggatccgggacaactcaatggccacagaactacaaatccaaactatatacagccagtaaacctcatacgaattgtacagacgttagaatctatatttctatcgggcactttctagtcacaaactacgggggatgtggcggggaatccaaggcgaaaagaaaagggaaaaattaaaatgacaaggtgaaaagaaaaagaaaagccccctccttcggagatgctgatgccgatatgctgataattatgatgtgcttctcccatgcatgccgcccccgatgaattaaaaagttcttgctttttgttttcgcttccctgtgcatcgcgccgatcccgcccagtagtttatgtcacaaatgcgcctatcaacagaaaaattaaacggtcaagagtgtggaaatcagaggcacaaacgagtttgtattctgaataagcagaccgcatcatagtgccatgcaatctaaccatagagagaagacgcaagacaaatggtatctagtgcttcttcttgtccttctccttcttcgggacttccttgagaatatcgtcgaaactcatgttcgggttgaagcgactattcggacgtgtaggaggctcgataggggcaattcctgccgggaggggcaaggcttccaacccagggtagaatgagtggcgatgctgctcggcccgttgggcagcggcaggcgagcgcgttcgtggaatggctggaggcgggggcgtgagcccaccagggaccatagggtagggatccgaagaagagccagccgatgattgatggcccgggtaaggtgatgatatagaggactcctcatcatcgtaggtggcatcttccaccataggtggatcgaaaagagcgcccgcctcggcccactgctcggcgacttgccagcaatgactgcggcggtatacaccttccactccgttgatgactacgtccgatggcatgctaacaacgccagcaccaccggcaactccgaaccagctgcgagcagtcttggtgtcattatgaatccagggagcaccgccacgtggagcaatgcagaggaaatactccacgccctcgttgaagtggacttcagggacatccaccaccagcatgggcagggcttgaatgacggcgtagaggaagatccactggccacatcggaggtcggtaatgtcattagcattcttgccgtgcgcggaacgacgctcgaactgcatgaagctctcgatgaaaggagtgggtcgcatggcctcccgggtataagatcccattaggacagcattgatgtcggagtccttgagctttttgacgctctgcttagcctccttcttggcatccatcggtttccgatgtaagggctgcagtgaaggtatctgtggaatgtcgaatggaatgggaggaagtactggtggtgtgctgcggtcatattcggagaggacctgccgcaaggcacgaatggtcatttgcttgtaatcagatgattctgtcgtgtcattgcccgcacccgaaacatcaattgtacgcgtcgtcagagacgtgcggtcaaccattaaatcgtagagatcggtgaagtcgtggtacaaatccagaaggagaagacggttgagtccgttctcctcaaactcgttcttcttcgaccgagccttgggcggccacgagccgtatttctctcggtagtagtggattgtaaagcggcggaattcatggaatcccgtcctccagttcttaaaacgcacaaccttactttccggggaagtagtcgagttggcaacacccgagaaaacggaggggaaatcgaaatcttccagtttgccgtagagaccgcgcagacgggtgtccaaatcaatgaacgcgcgctccatgcgtttctgcgtgatagggtggatgaaggtatatttagggctccgcagttgcttgagctcatccagctttcccacaccgtggacaaagccctcgacgtacagcggatagtagcgcagacgctcacccaaaacgatggcctcgatcgtcttctccctgcttcgacggacatctgcgaggcgcaattcttcgcagtagttgctgaaactcgaggtggcagtctcaccaaaattggacgcatccaagttggagaactcaaaccgggccaaaaggacggccacgtccatgaaaatagagaaaagagtggatgacttgggtgaggcgattaaagactggccgagcaggaacgcgaaaaggttgcggaacaaaagaagagtctctgtgtcctctggaccgagccttgtttgtgggttggacaaatcgcagttcagcggaatggggaggtaaagatggagttcctgcacttcctccggggtatcttcgaatgccatcctttggcttcccgcactgtcattatcgttgtcattttcgggctgacggtccaccggtgacatagggggggacatgggagacccgggattgagtgacatcgttctagttggctgctcaaggccgctcttgccatcatttccgcgggctagaaaagtgagggagggtgattcggcaaatatggtggaatcgaccttgaaagacggagggtggccggtagtctgggggaacatgtacacataagtgtcaccttgctcgttccacagttcctggatctggaaagtgataagaaatgattaacgtttgcacctcaaaacaagtgatttcgcgtctgcatacctgttctcctctagacaatggacctaaatcataaacaaccttctggtccagtcctgcgatccaagcagccggaagcattgcagcaggccgcttatcggttgagctggcgcgcgaacgaccgggcatccagcttctgcgctttgacggtgtgctagggcgggaatctgggttggatccagggatggtcaaccctgccgagctggagggcctgctcatatcacggcctctgctctgcggacggccaatgggcgaactcggcacgctgttggccagatcctggttcacctccagcagtgacggtggtgggggtaggctctccatatcgaggctatcgggcatggtccttggctccgaggcatagacggcattgggggttgagacatggcgagtgggttttgagctgctccggcttcgtttgtcgctaacgttttctgacgaattcaacactggcgaagacgcaaccgaggattgggattcccgatcttttgatcccagcgagaacagagacgaaatccgcttcgccgacttaacgggagccgacaacatcttgggtgatagagatgttgggagaggatgagtgttttttttttcggggatgagagcgacccggaggtagagaaggttaagcccgcatgtgagccctgggggaatgaagtgtgcttggcaggtgatggggggaggcggaggtttagggggttgtggaatggatcggcaggagggattggaagaatgataggaaacctgacaccgttcactgacgagaggcgaaaaattagaaaggaagagaatgacaaaagggagagaagctcaggagaagatgagaataaaaggcacaaaagctaatatcggagccttaatttttagatttcactattatttcacggttttaataataatttacgaatacatgccagatgcataatacggcctattgccaataatagaacgagcacgatgagacgagtggttccccggctgtgcatgtcttggatgtggagacaataaaatacgcgatttatagaagagaggtaggtaaccatattcaattgcgttatagggagtgtaggagaaatggaaacgatatccacgtctatcgattgtgtatacatgggttggagtaaacaaataactgtacaaagtgcttagggagcataacccaccttgcaaggacccaataaaagcctttatataaaacacgatcatgccgctgtgatccgacataactggggataccagggtatgcaccgtatttaagaaaaccagtagaaagtagtagggagtatgacgagacgtacagagttccatccgacaatatcatagttgccctcccccgtgtaaaatttgatggcaaggtcgggaaactcgcgaccgagggtgacagtcgagggaacaccggggttttgaggccgacgcttctcaagaagtcggacttggggtatggggttttggatctttgtgcacaatttggcagtcgtatccatcaattatggcggtttggccgagtggtctaaggcgattgactagaaatcaattctcttcggaggcgcatgttcgaatcatgcagccgtcgtgctgtatccttttttttggacaatttctgacaatcttttttatggttttgctgctgcggagtacatggacgtaattaacagaatttccttaatcctagatttactatagccctcgagctatctaggaagaaaccaactccgttgagccgaatagtctactaagatttcatttcttatggagatatgtttcacgagagttcctagtatttatttttagcgagaactattcaggctagccagcgtagcatacacaattcctatcagctctatgatacacatttggagcgggctaccacacatttggagcgggctacctatctaatatggcggtttggccgagtggtctaaggcgattgactagaaatcaattccgttcgcgggcgcatgttcgaatcatgcagccgtcgtgctatttcgttttttaatattttattgacaatacatcatggaggacaccgctattccagtaccgccttcctaatcgggttctactcaggcgctaagcgatattcaaaatattcaagccgtggaagttcctggccaactaaatgcacccacttacaacaccattgcaagaaccattgccggaaccatgccctggaatccacgtcaacccagtatctttcacgatgagtcatggcctacaccatggcgttcatctgaattcccacccgaagaaacttttgtcgaacgaatcaatcgacagcatgcaaatcccgagtgggagtctgtaccgcacttcttatactacgagtctggtaggagtgggggttggccatggggatgggccatctatcgtacctcctatctcaacacttccgatcaagactggactagagctattgaaaagctcgacgaggcctgtatggctgacctggagttttacgagcgcagctggcaccgattcgacctcaaatgcgttgaaatggtccgcgagggttatcggaatgttatctttgaagaccccgcgttagagggcgcgtcggaagcggttatccaacgtcgacataaagaatgggtcgaaagccatggcctccgcatatctagtggcattcctcgccttggttacgcacttttgttagatgatcgctgtatacgatcaatcttggccagtgcggcgcctagaaagccatctgttatcgaacaggggctaccatggccaaagattaacgataaaccgggggggatggtcggttatgttaactttatcgactctttcttccgccccgaagacccggaaaatgactatggagagtactaccgtggattggtccgtgttcatttggactgtttagcccattttgctatctattgcgaggatcttgagactggagagcaggaatggggtgaatatgggatggacatacctgacaatgtattttatacagatggccattgctcaaagactgagttgaaagaaatgtttctttcttccccagatagaaacgttgacagaactgcgagtgtgactgagctcgagtatatcgagcgccaggatatggagaacttagcattgagtaatgtgccgggttctacctaacactggaatgacaccaataccaacggcttttttaatccctagataatccaacagttatcctctttcaaaaggtctttttggtcttttctaggatatgttagaacatgaccactaactacctccgaatattattagtagggaacctttgatacaagctatttctagacctttaagagactgcatacatatttgtataaatattgattcatggcagctgattaacctcccggcgaaaaacccggtgggcgcgatggacccaaaaacctccgtaaagagcaaactatgacaaatcagaataacatcctagtgatttcaagagaatcattggcgttgagaacgatatcgtgttcccctggtcctgggggtcgatcgtaaatagcaacgaatggaagacttgacggggccccgacaacgttgttggactgaacgtagacctcctgcaccgagtatggctgctgggtgggaatcgcccggatagcaagtgtaaggggggctagttgacatttttcaaaggtgacttcagtcaaccccatcgagataataataacaatgcgcactagaccccggggaatgataagccatctcttagcgtcttcgcgaagccgagggagggatttagaaacgcccattggggcagcgatctggtggtaagaacgcatggcctccctgtttacctataccggcggcnnnnnnnnnnnnnnnnnnnnnnnnnnnnnnnnnnnnnnnnnnnnnnnnnnnnnnnnnnnnnnnnnnnnnnnnnnnnnnnnnnnnnnnnnnnnnnnnnnnnnnnnnnnnnnnnnnnnnnnnnnnnnnnnnnnnnnnnnnnnnnnnnnnnnnnnnnnnnnnnnnnnnnnnnnnnnnnnnnnnnnnnnnnnnnnnnnnnnnnnnnnnnnnnnnnnnnnnnnnnnnnnnnnnnnnnnnnnnnnnnnnnnnnnnnnnnnnnnnnnnnnnnnnnnnnnnnnnnnnnnnnnnnnnnnnnnnnnnnnnnnnnnnnnnnnnnnnnnnnnnnnnnnnnnnnnnnnnnnnnnnnnnnnnnnnnnnnnnnnnnnnnnnnnnnnnnnnnnnnnnnnnnnnnnnnnnnnnnnnnnnnnnnnnnnnnnnnnnnnnnnnnnnnnnnnnnnnnnnnnnnnnnnnnnnnnnnnnnnnnnnnnnnnnnnnnnnnnnnnnnnnnnnnnnnnnnnnnnnnnnnnnnnnnnnnnnnnnnnnnnnnnnnnnnnnnnnnnnnnnnnnnnnnnnnnnnnnnnnnnnnnnnnnnnnnnnnnnnnnnnnnnnnnnnnnnnnnnnnnnnnnnnnnnnnnnnnnnnnnnnnnnnnnnnnnnnnnnnnnnnnnnnnnnnnnnnnnnnnnnnnnnnnnnnnnnnnnnnnnnnnnnnnnnnnnnnnnnnnnnnnnnnnnnnnnnnnnnnnnnnnnnnnnnnnnnnnnnnnnnnnnnnnnnnnnnnnnnnnnnnnnnnnnnnnnnnnnnnnnnnnnnnnnnnnnnnnnnnnnnnnnnnnnnnnnnnnnnnnnnnnnnnnnnnnnnnnnnnnnnnnnnnnnnnnnnnnnnnnnnnnnnnnnnnnnnnnnnnnnnnnnnnnnnnnnnnnnnnnnnnnnnnnnnnnnnnnnnnnnnnnnnnnnnnnnnnnnnnnnnnnnnnnnnnnnnnnnnnnnnnnnnnnnnnnnnnnnnnnnnnnnnnnnnnnnnnnnnnnnnnnnnnnnnnnnnnnnnnnnnnnnnnnnnnnnnnnnnnnnnnnnnnnnnnnnnnnnnnnnnnnnnnnnnnnnnnnnnnnnnnnnnnnnnnnnnnnnnnnnnnnnnnnnnnnnnnnnnnnnnnnnnnnnnnnnnnnnnnnnnnnnnnnnnnnnnnnnnnnnnnnnnnnnnnnnnnnnnnnnnnnnnnnnnnnnnnnnnnnnnnnnnnnnnnnnnnnnnnnnnnnnnnnnnnnnnnnnnnnnnnnnnnnnnnnnnnnnnnnnnnnnnnnnnnnnnnnnnnnnnnnnnnnnnnnnnnnnnnnnnnnnnnnnnnnnnnnnnnnnnnnnnnnnnnnnnnnnnnnnnnnnnnnnnnnnnnnnnnnnnnnnnnnnnnnnnnnnnnnnnnnnnnnnnnnnnnnnnnnnnnnnnnnnnnnnnnnnnnnnnnnnnnnnnnnnnnnnnnnnnnnnnnnnnnnnnnnnnnnnnnnnnnnnnnnnnnnnnnnnnnnnnnnnnnnnnnnnnnnnnnnnnnnnnnnnnnnnnnnnnnnnnnnnnnnnnnnnnnnnnnnnnnnnnnnnnnnnnnnnnnnnnnnnnnnnnnnnnnnnnnnnnnnnnnnnnnnnnnnnnnnnnnnnnnnnnnnnnnnnnnnnnnnnnnnnnnnnnnnnnnnnnnnnnnnnnnnnnnnnnnnnnnnnnnnnnnnnnnnnnnnnnnnnnnnnnnnnnnnnnnnnnnnnnnnnnnnnnnnnnnnnnnnnnnnnnnnnnnnnnnnnnnnnnnnnnnnnnnnnnnnnnnnnnnnnnnnnnnnnnnnnnnnnnnnnnnnnnnnnnnnnnnnnnnnnnnnnnnnnnnnnnnnnnnnnnnnnnnnnnnnnnnnnnnnnnnnnnnnnnnnnnnnnnnnnnnnnnnnnnnnnnnnnnnnnnnnnnnnnnnnnnnnnnnnnnnnnnnnnnnnnnnnnnnnnnnnnnnnnnnnnnnnnnnnnnnnnnnnnnnnnnnnnnnnnnnnnnnnnnnnnnnnnnnnnnnnnnnnnnnnnnnnnnnnnnnnnnnnnnnnnnnnnnnnnnnnnnnnnnnnnnnnnnnnnnnnnnnnnnnnnnnnnnnnnnnnnnnnnnnnnnnnnnnnnnnnnnnnnnnnnnnnnnnnnnnnnnnnnnnnnnnnnnnnnnnnnnnnnnnnnnnnnnnnnnnnnnnnnnnnnnnnnnnnnnnnnnnnnnnnnnnnnnnnnnnnnnnnnnnnnnnnnnnnnnnnnnnnnnnnnnnnnnnnnnnnnnnnnnnnnnnnnnnnnnnnnnnnnnnnnnnnnnnnnnnnnnnnnnnnnnnnnnnnnnnnnnnnnnnnnnnnnnnnnnnnnnnnnnnnnnnnnnnnnnnnnnnnnnnnnnnnnnnnnnnnnnnnnnnnnnnnnnnnnnnnnnnnnnnnnnnnnnnnnnnnnnnnnnnnnnnnnnnnnnnnnnnnnnnnnnnnnnnnnnnnnnnnnnnnnnnnnnnnnnnnnnnnnnnnnnnnnnnnnnnnnnnnnnnnnnnnnnnnnnnnnnnnnnnnnnnnnnnnnnnnnnnnnnnnnnnnnnnnnnnnnnnnnnnnnnnnnnnnnnnnngcgacgtacagctgggatgagttctttgatgatgctgatactgattgagtgaaagggtgagcacttgggcaagatgtttaagtccaaaatcggtagtattttttgtacaaattccccttggattgcctcgggggtagataaacattacagatttccagtccaacatgtgggaaattgaggggtagtaggatataccagagatagtgagataataagagttcttcggtattcatgatattataataagactacgtacggttcgctgactgcattcaactgactattgatagtacatttattatctctggtttatagagccaaagttcggatgttactattaataattacggcggtttggccgagtggtctaaggcgattgactagaaatcaattctcttcggaggcgcatgttcgaatcatgcagccgtcgtactgtatcttctttttatttttattatttctatcttacccgtcctacattactactctgtacagagtagttaagtattaagtggtctgtccaaggagtttttgttttgtctcttttcgttgggatcatatacaaccaaggatacaaggtataaatcttaggtgctggtatgaaaattggagtaccgccttcccaatctgatgcaaatacaaattctgccatatattctgcctacttttgcattttaatcacaatatttaacctaatccttacagaggaatgaagtagttgataaggcagttgacgatgaagcatttgatgcaagatatgataggagtaacttaaatttgctaggagtttacatacgaaatgtaggtacctgtcatatgcagtttaatacaaaagaggtttacaaattaggaggcggtgaagagagcggtaggcagaagcaagattgttattcaaccaaattacgaaggcggtactgaatcctcaggcaggagagtgtgtttatactgaaagggggatgttctgacaacaagggggatacatagtacattttctcaattagaaaaattacaaaaaaagaattatagcacgacggctgcatgattcgaacatgcgcctccgaagagaattgatttctagtcaatcgccttagaccactcggccaaaccgcctaattattaagatagattcaaaaatttggatctataagccagggacaatcaatgtaccatcaatcatcccatcctagtaactagtgcggagtaccactttcaatattgctcctctgcacaaagcatttgtactctatactttgtacacatagaataggatagttcttgtttcgtagtaatatattgctctacaggcattgggttcgtatttggattagatctatggtgtagagtcgttaatacttcatattttttttttatatacacctagaaacatagcatattgtgtgtaccaggtctggctaagaatgtataaaagattacctaggtgatgtggtaggctttttgtctagtagtcgaaaaattcaatactaggtttgagtcgttcaaatttcgtatgaaatggacctaaatctataaacatcatgagctctattgattttaattgactatagcaactgcaaactttgaggcctcgagaggggttaggttattcaacctgcatataccaccgggtatcgccaggtagtatataagatactctttcttatatgacatagaactacctatataatgggttcaccttactactttcaaccagacttcgacaactgataaaggcctggtcatccgtatgtcttaggatatagaattcaggcgtaacattatcgagaacgaatcacctgtagtgtgctattatttgtcatatgtcaggacttagaatagggaggcaaagaccaattagtcaatagcctgttcatatttcatatcgattactaaagacaccgtgaccattgaaccttggaacctctattattccccagtgtctctgcacttttgtattagtacctagtaggtaccatgtcgggtcagcaggcgtgatccctaggctgagtaacatataactgagatatattccacgcttagtacgatcgagttatacccatggattcctgctagtaccttggtaggtgcgcagcccaggtgatgggaaatttaaaaccttggatactgtactacaatatctacacatgtacccactatggatatatcccagtacaagagagcaacattaaaaccttggaactgcccaggtaggacctaagtactaaatcaagagcatccaatgttatttttcataaagcgataggttcctacttgtttctgctactaaatttgtgaactgatatcttgacatggatactcatggttatcaattgctagcagagctatgaatacgttatgaacatgatttgtcatcaattacggcggtttggcccnnnnnnnnnnnnnnnnnnnnnnnnnnnnnnnnnnnnnnnnnnnnnnnnnnnnnnnnnnnnnnnnnnnnnnnnnnnnnnnnnnnnnnnnnnnnnnnnnnnnnnnnnnnnnnnnaccagccatactcggtgcaggaggtctacgtccagcccaaccatattgtcggggcaccgttaagtcttctattcgttgctatttacgaccgaccgccaagaccaggggaacatgatatccctctcaacgccagtggttttcttgaaatcactaagatgctattctgatatgctctattttgctattgggctcactacccatcttctctagatacttcttcgattttctgtgtatcgttaattggaatatttctacaaagaactgtacctctattgacctaaaatctattccatctattagggatctagtacgcatattatccttaatggtccgagctattatcacgttgagcttctcgaggtcgaagtagttcgtgaattggtttttttttgtctattgtgtgccaatagtgttttatagtacgaaaagtggatgtaatttaatagatacgtaattatctactactccgtagctaggaaataattggagcttttaaacgagagacctaattagtatgtccatacggagtactctgtttcttcgtgcgtgtaaaacatgcacgtaatcagtgtgctttgtagtggctaaggtggccgctcactatatcaataatggcggtttggccgagtggtctaaggcgattgactagaaatcaattccgttcgcgggcgcatgttcgaatcatgcagccgtcgtgttcttttttttctttcatttttatactcgatccatgataccgcatgcttacaaccttaccgtgttcttattttttattttcttacaatacaccatacatggaggacgccgctattcctggcctctacatagataccaaccaataccgtctctgtgcctgttaaccccctcgaaccattcaatccccgatctcggatgcatcggtgcccacctcgccacatcaaccgtggaagcccaagctcttacccaagcattaatgctagttgggttcaataacacgcaattgatattcatgaactccaattgacatcctattcgtcatgacactcaccgtttcccccgaccagcccattgacctccaaatcggctggcccaaccccgcgctcctccccgcctccatcctttccgactccgctacgaccgtattatccactccctccattgcaaacccagccctcctctacggccccgacgaagggtacggaccgctgcgcacacacatagccgcatggttgagtgatttctatcagccccgcgagccggtctcagcgcagcgcatctgcatctccggcggggccagccagaacctagcatgcgtgctgcaaaccttcacagacccggtctacacgcggaatgtatggatggtcgcaccgacgtaccacctggccgcgcgcatcatggaggactccggcttcgccgggcgcctacgcggaatccccgaagatgacgagggcatcgacatcgcggtgcttgagagcgggctgcgcgctgctgaggaaatcgccttgcgcgctggaaacaccgagccggtaggacaagtcttgatcctatgactgagtgcagtcactgtgccatgccactgtaccatcatttgttgagttctggactgatactgcccctctttccctgcagaaaatgaaaccgcccaggccctggcgcaaaatctacaagcatgtcatctatgctgtgcccacttttgcgaatccctcggggaagattatgtcgctgcggagacgggaggcgctcgttcgtctcgcccgacagtacgatgcgctgatcgtgacggatgatgtgtatgatttcctccagtggtcggccaagccggagggagaggagaattccggggaccgcgcatgtgttccgcgtattgtcgatgtggaccgctacttggatggtggtccacaggatgaatggggacacgcacttagtaacggcagtttcagcaagctgatcgggcctggtgcccgcaccggctgggcggaggcttccgaaaaggttgcatatggattatcacaaacgtacggggcactgctgggatgacttgactgaccaccccccccttctcggatatggaatcgcagactgacccgatatcgcttgcagaggctcttcccgatcgggcggcgctccctctcatttgtgcgccgctgtcattgaccagatgttccctacaggcatcattcagaaccacatccgggacgtcctccaaccgaaatacgccgagcgctaccacaccctgctagcagggatcaacgaacatctcgtcccgctgggcgtcacagccccaccaaccgctgccgcggccggaggttactttatttggattggtctaccagcgccgttgctcgccgccgacgtagcccaggcagcgctggatgaagaaaatctgcgtttatcgccggggcatgttttccagatccccggagacccgcaggtactcgatgaggagtttgcagatcatctgcgcctctgttttgcgtgggaagagccacgacacttgagcgagggaatgcgtaggctagcacgtgttctccgccgtatgactcgtacccaggtctaggtattgtgcgccacttcacccacttcacagccactccaactggagtgtccactagacgcgtggcgcatgaaaagtacataacttcaacatatagacaatttacaacgtagccttgccagctcataaaaaccttcgagttgggtattgtacggagtactgtacattttatatcgtaacgttgaggctctgcgttgggcattactacaacatagagacgcgagttggctgggcccagggttgggccattttcagaacccaataccgccagcacattgaaagtcatgtacaaaggttgtataattctaccagagaacaacaggggcaatactaattagacacgagacaatttaggatcagaggggcaagccaatcccgagcgggtcctccgactcagggggagtaaagagcaaagcttggcctcgacactttccccctctttatttgaatcaacgccaacccttaagttgaccgtcggaaattccagaggtcgtggccttgtcctgttatgagcttggcttttggttctccgtcatcaggaatccttcaaaccccccggaatgttcatccataacttgaccccctgacaacacgcgggggatatacgccgctttgactcgacgtcgagtcttgtgctacaggtggaattacacagacacagatacatacacagacatatgcaaacatgcattttcaagcaaaaggaatgaacagccctcgatctgcaataaaaaacaaatacgatgccagttctggggaatcgcggtatcatcctctcttctcttctacacggcctgaacaaagggatccactcgagtcaagggcatggtgatacgcgacaacgtgcaatgctcgtcctgtccccctgtgagcataacccgtcgcagatgattggaatggatgaccgacatgccctgtttggggtatgaattcaggttatatagcgcgtagacccgtagtctgtttattctcgtctgaatgctgtttgtgctgttctaccccgtaccctgaacagattgacctggaaattgccaaccactcgaagcgatatctaagtttcgattcgaaacatttgcaagcgccagccatcttcagcgtttcaactgcagaccaccacgtttcaagcgaagacgctgtcaccaggccgggctttctgattggtggggtgtggtggactttagggctgtggcgcgtgtgattggctggaaaggggaagtttgcaaacgctttgccttataggtatgattctcctcccgtctctatggtcgtggcctattttgtgtcgttctttccttctcttcttcatttctattcattccattcattcattcgttttttcattcatttcgtcgggcaccactctttgtcctgtctctattttgggaaggaaccctgcattggaagattcactctttaaatcttctttgctctcctgcatatcgctgctggtcaagcgttggactcgattcttattccgatatccgcagtactggttgctgaactatctcattccctagacatacttctttctacttcgctgcaggttcagcgttatccattttcaatatggccgttctacaaacctccatcgcgatctttgtcgcccatatcatccttttgctcggtttaccagcctctttggtcgcagctgtgccactctccgtgcctgtatctcctgtgaacaacgtcttggccactaccgaaaagagatccacctcaagctactgggtcgccaatgttgagcgtcagggtgttgtcccctttgccacgagcaccgactacaagatcttccgaaatgtaatggactatggtgctaagggtcagtcattcatcttacttctataccctcgggcaatatgctaactatgtcccaggtgacggttctactgacgacactgtcgctatcaacaaggctatttcttctgggggccgttgtggcaagggctgtgattcttctaccaccactcctgctatcgtctacttcccccctggtacctatgttgtctcgaagcccatcgtgcagtactactacacccagatcgttggtgacgctgtcgaactgcccgtcatcaaggcctccgccaaattcgcgggtatggctgtgatagatgccgatccctacgaggacaatggcgacaactggttcaccaaccagaacaacttcttccgcgccattcgcaacttggtcattgacctgaccagcgtcccagaaggctccggtgccggtatccactggcaggtcggccaggctacgagcttgcagaacattcggttcgagatggtcaagggtggtggtgacgccaacaagcaacagggtatcttcatggacaacggatccggtggtttcatgtccgacttgactttcaacggtggtaactacggcatgttcctcggtaaccagcagttcactactcgtaacctgaccttcaacggctgccagactgccatcttcatgaactggaactgggcctggactttcaagtcagtccagatcaacaactgcgaggttggcctcaatatgtctacctcgccttccaaccagactgttggctccgtgttgctgctggacagcaagctcaccaacacccccactggtatcgtcactgcctggactcagaagagcatccccgttggtggtggtgatctgattttggataacgtggatttctctggctccaagattgctgttgccggtatcaatggcaataccatcctggctggtggctctgttgtcgacaactgggttcagggtaacacctacaccccgtctaagactgtcaccaagcgcgccagcgagtctgagcctgaggtggtcaccgttattcagaccgttacggagactatcatggcctgtcccgcttcctacggtctttccagcaccagcttggtgagcagcgacgttcctgccccggcgaagactgcgtcacttgaatctgctcccgctccttcgcctgttcccggtgttagtaccagcagcgattctgatcgcattgctcagacttcctcgatctctgtctccaacagtgtcctttccattctcggatcctcttctgaggcctctgaagtctctgagcccacttccgcagctgctccttctagtgaggcccctgccacttctgtggtgtctgttggttcttcgccctctagtgtggtttctaccaagcaatctgctctgcctgtcgtctccactgctgttcctgtcacctccaatgttgtgcctgtcacctctattgctgcgtccgtcacctccactgctgcgtctgctaaaattactagcagcagctctgcagttagtcaggccacccagtctggtagtgacagcagcactgccacttgcggcgcctcgggcgccgttgcctccgcacgtacccagagcactctgaagacttcttctaagcccgctagccttctcaatggaggtgctatcttcgagcggtccaagcctctgtacgaagacgtcgccgcatcctctttcgtcagcgtcaagtcggctggtgccaagggtgatggaaccactgacgacactgcggccatccagaaggtgtttgacagctacaaagatggccaggtcatctactttgatcacggtgcctatgtcatcacctccaccgtcaagatccccaaggatatcaagattactggtgagatctggcccatgctcatggcatacggcgagaagtttgccgaccaagagaaccctgttcctgtcttccaggtcggccaaaagggtgacactggctctgtcgagatgagcgacctcatcatcaccaccaagggcgccgcccctggtgctatcctcatggagtggaacgttgctggctcttcccaaggctccgttggtatgtgggatgttcacttccgcattggtggtgccgctggtactgagctgcagagtgacacttgccccaagacccctaagcagaagaccacccctaataaggagtgcatggccgccttcatgctcctgcacatcaccaagacgggcagtgcctatctcgagaacacctggttctggactgccgatcacgagctcgacctcaaggatcacaaccagatcaatgtctacaccggtcgtggtgtgctcatcgagtcgcaaaaccccgtttggctgtggggtacctcttcagagcaccaccagctgtacaactaccaggtctcgagtgccaagaacgtcttcatgggtctcattcaatctgagactccgtactaccagtccaacccgactgcgctgacccccttcaccccgcaagactcctggaacgaccccgacttctcgaactgcacgacaaactcctgccgcaagtcctggggtctgcgtgttctcggctcctcggacgtcttcatctacggcgccggtctctacagtttcttcgagaactacgcccaatcctgtctcaactctgaggactgccaggagaacatggtcgaggtcgactgttcggacgtcaagctgtacggtctcagcaccaaagcctctgtcaacatgattacctcatctgacggcaaggctctggtccttgagaagcctaataagagcaactactgctccaccatcgctctctttgagcaatctgcttagattactcttctttcctttctatcattctttttctcattctgttctcgttcattgttgtaaacaataccatttaacttcttttgtacttcccccaacgttatatgagattcaatctccatcttctgctcctatatttctgtctagacacttctttctcttaaacttttctctgcgtcggatgcgcgctttgggggtcttttgctcgataccattgcattcggtttcattcatgggatcattactagacttttgtttcctttcggtatcacaatatacaatgccatgacatcttacgacctttagacctgtagcttgtttgtcatccggagtcagcgatgttaatttccaatattagcataagttcccctgcaatatacatagcgggtagatcataaaaaccccgtcggaacccgaagccatgtgggtctgatacgtctttcgtgcttatagtctcggagtccaggttgtgattttattagcttatttgcatgatatctctggtcacccacaaccccagggaaacacggcgtactccgttatcgagaaaaggaggtaaacggagctaagagaagtgacgcaaccaataagcactagttggtaattatccttggataccattcgccaggcttatatcttctagacctcattgaaccgaatgtggctgaatcatgacagggtttatcttcaggcctaaaaagaaaaagcaaaacctcgagacctcatggcgtgcaatacttttataatgtcgatgactccctcccaagagatacagatgcagacgcatgaccaaaacgagtcgaaaaagcccagtaaaccccaacgtctcccattccggacatcatgcgacccctgtgcagcttctaaggtgcgctgcaccaaagagaagcatggatgttcgcgctgtgtcctaaacggctctaaatgcgtgtatggacgctcgcgaagaaaggggaaaccgtcgaacaagactacaactgaactcgcccgtccacctgttcatcctccgtcttctcgagtccagatgtctccagctcctctagctcccttagcccctctagcacttccagccctttcggctctccctatccttcctgaccatcaaccatcctggcccatgggcccgaatcatcaccagcccaactataactacaactctacttggtatcggtctccaccatccccaacgaccaattatccaaccccgaccgaatgggagagaacatcaaataccttgcctccgagcttgactcatcaatcaccgggtgagaatgcagggactctgcatttgcccaacccgggatatacatggcctagcatggtccggccgcgagaggtcccggaagacgaccaacacgagccttgcatcgcggtagcatgtcgaacgctctcctcgctgtacgaattcgttcaatctgactgtgtgaatggacacacagccaacgatacccaatctcgcaatatgctccaaccaccaaccctaagggaatcccccgcaaacgatgtcgtgtttcgcatgactcgatccgccacggagacggtttctcgattattgaactgcaccgggagatcctgcgcacgggatccttccaagctcctgcttctcgggtctgttcttttgaaagtcttaacttggtatgaagcactctatcaatctgagattggcgggccggacacttcgtcgttggataatcgcgaatatgcacgcttgcagccacaaccatatcatttgaatggcaatacaggtctctcgcgaccgtttggaagtatgaaagaatcaatacttgctatcccattgaccaccccgttgggtatcgatatggttaatatctcccgcgccacggagacaaaaatgaaagcccaagtactgctctgggaggtgcagatcttatctcacgtgtgccaggctctcgagcatcgaatacaggctgctgagagcatacgcggtgagaataatctgtgcggacaggcaaatgcctatttatcgcggaaggtgggcgagctgcagcgcgctttgactgtggtgtgtacgccggtaccgtcactgggatagatgtcagatcgagaggatacatacatacagtatagaccaactcggtgcctgggattttaatattaatactgaataaattatggtacattctgttcttggtacaattctcgcgcactatctagagttctcaagaaattacaggattcatcatagacaaggctctatatatcgaaagtaacctattcgctctctccatcatcgcaagcagccttatcagagacacatgtcgagatattggcaccgggagttgaacgacacttgtcgaagatctcttgacaatcgccctcagcggagaccacgcgcaccgggtgtcgcaagtgtagctttgcgcgggagttgatctggccgtgtcgacacgcctcgcggtcggagaagcaggtggacatgttggcgtctggggcagtgacgcacttgttgtaggcgtcgtcgcaggtagaggtggtttgggttgcggtgatgctggttgccagggtgagggtgaggagggcttttaggtggaccattgtggaggtttgaggtttggattgtggtagtatgaagatgggtatacttgagatgatggaactgggtttgtggcgtgatgggtggcttttatagacagtagttgcgagcaatattgctttggttgggacaaggggctgacaaggggtactgtacattgaacttcagctattgaatgcatgatgagcgatggtatacactgtgtcgatcttctgaaccccacaactcgagcatgcggtcagttggatgagtggaaatagttcctgcactgctagggaaactcgatgtagagtgtgtatgttgatttcttgcgctgtagagagaatgtcgcaagagatgctgttgtagcttgtgatcggagagattaggcattgtagtgtgcagcaatcgagatcacattccaggtgcgtcagtgtgagatctataggactgatcaacatgatcgacacaagggaaatctggcgctagtctctacctgcaggttacctgatactagttctaataattcaatgtccggtggtttcttacaagaagcacaatgttgtactgagtactgatgatttaatattgcagttaatagctgttctagataatgacttgcttggtttcaccataaaggctactcatcctgaacaccacgtaaaggtgcaagtcttgttcaggtgccacacacaggacccgtgaagctgggttaggaaggagggggagggggnnnnnnnnnnnnnnnnnnnnnnnnnnnnnnnnnnnnnnnnnnnnnnnnnnnnnnnnnnnnnnnnnnnnnnnnnnnnnnnnnnnnnnnnnnnnnnnnnnnnnnnnnnnnnnnnnnnnnnnnnnnnnnnnnnnnnnnnnnnnnnnnnnnnnnnnnnnnnnnnnnnnnnnnnnnnnnnnnnnnnnnnnnnngggggggagagggggggagggagtaatcatatcaaagaaagaaggaacaacaaacacagagggctatctccgtgaaaaagttccaaaaagtgggttggagatgaagacaatgtgggcagcagctggacagtccgtatccacagaggtcagtcggagtacgtgactggtagagcattgttacctcctcggacatgcttcgtgccacaacctaacctgatatccacagagaccaaagtcaaaagaataagaccactccaggaacgaggtgtagtgcggacctagagtggtacgaagaaggaagaaaaaaggaagaggaagaggggggagggggttgggttttataccctgggggtggtgactcaaggcaatgggggaaactgcggttggtgacgatttttgaccaaaagggaaagcacccatgagataatcacatgtgcacatatcacatggttggagacttcaggctgtgttccatcatattctcacccaaatagctctacagccagtttttcctagtcgcttgggaactatcagtaactgctaatcgtcgacattctgacagtcaatgcttggtttattaaaactgttcatcgggctgtccctcaaagagaccattggacactgaccaatgccgacgagggcccaaagaagatatggaaaggcactatattctacagttactgtatggtttcccggggaactttattcattgcgcaataaaacaagaaacagcctaatcgtactcttccgaatagaataacacaggacctgaagaacttgaagataattgaaggagggtggacttcgtgttaaagctgtccaaattgtcaagcaaactttttagagctcctttttcacggaatgctcaggcttatgggtggtctcgtagtcaacatgcacataggcacgctcaacgtcgggaagcgactccagcttaatctggagctcttcagcaacgtcgtgggtagcacgtagggatgcctccgcgtccatgacgacatccacctcgaccagcaggcgagggccagaggtgtatgcacggacggtgtcgatggcagtgatgacaggagagtgggtcatggctgaaagagatgttagtgaatgctttatcaagagctagaagaaccgaaagggaataaacataccgatatacgtgatgagttgctgcatcttggtgtcggcagtaacgccgacgagcaactggaactcgccataggcggagtgcagccacagcccactgaccagcacggacagaatgatagcacccatgggatcgatccaccaacgcagcttactaccaccgacggaagtcagaataccgaacccgttgatgaacagatcgttgcggtgatcctcccacagaatgcggatctgggagacctggttgcgcagggcccaacagtaaaagaagagggctagtttggtggcaaaggcgacagcgacggcaatgatggagggcaggtggaaagactgggtttcttcctcggagcccgctgccagttcgcgaatagagaaggcgatgatgatgaaagagaccgaggtcataaggaagcagaagcagatgttgcccgcggtttcaatgcgggcctttccagcggggaacttccgtggatcaacgcgattgacggccttgttgcacagcagaagggtcatgttggacatggggtcgaagacggcgtcggccattgtggtaaacagagagagcgatccggacgaaacggcaccgtacacctgaatgaccgagagaatgatgttcgcggcaaaactaccgtagacagcaatccggtacttgagacggttgtcgacgctcagctcgcgggcagcacgtcggtgctcctcgacgggtttcagcatgcgctcgatgttttcattttgggactcgtaaaacccctgtagcttcttggtgacgaaggcttgctttccaagacgggcagtgtctcccactatgtctcccactctccggcctttgttcgcagtggtggaatcccgtttccgcgaggtattggccttcatctgtcggatctcatcctcggtctttagcttcgaggccaattggaacggatcgctttcagaggtgtaacgtggcggcaggctttcttcatcactggaactaccagttcggtgttggtgaatggtggtgagctcatgctcaagggcggtggtggtcccttcgttgatggctagtggaggcattctgtcactccggtgtgacggtgaaccgctatgagtatgatgcaagtgttggaaggcatgaggatggtttgagagactgtggcgtagatgttcctccatgatgaatgaattgaatgggatgaattggtgaataggacttgagatgaaagaaactcttcataccagggaaataattccaagattcccctgtggctgagcttatctgatgccccaccatagcttcttggcacctcgctgtcggggtggatgtatcacggtcgctggggtcggcaccccatcaccagaattcctaattgtgacccaataaacacccttttgaatactctagaattttattgctcataaaatggcagccgtgaaaaaaaatcggacggaaatccgagctccacgagttcagacgctaaatccataatgtttgctcacgtgataaatcacgtggtcaaactccccagcctcccccttcttccatcctctgggcatctcttcacctgctccaccttctcctccaccaaccatcatcctcatcaccatcatcaccatcatcaccatcatcatcatcccgtaaaggaagtactgttctttgccgtccttgtcgccagtcctgccattcctgtgttctcataggactctccgatttcacttgttgacttcggattgggcatgtgctcgtggccaggccgcaaaagctttaccactttgctcttctcttcttcttcttttcatcattcattctacatttcacgcgagtcagggctgctcaatactatttgaaagcccgggtgggagggtttctcgattcttcgagggtcttcctgtttaatccagcgaatatcgcacaatgaccaccagatcgtcaaacccgctctgggtcctgcagaagacagtccttgtttacacacccgatttcaaggcttgttgttctgctcgccttcgtattgcccacgataaaaccgccaaccgaggatctatctcccttcggtttacggcagagcttgctaacttgagcggcagatcacaggtgctgacgttgaatatcccaccagaaatagtcgaaaaatgtgaattagcccggataagcaacgtcggcctctgttcatctgatttgctccccaagctcccggcgcccgtgaccaacctttcggccgtctcaacactgagtctgatactcaataagactggtcgttttctttgtccatctggggtagagtctttaagtccagccaatcaagaagacttagatcttgacgcatttgcgaagatctgtcaatctacatctcttcgtctacacttttccaaacgacaattcgtggaaaaagaacttaatcagctagaatttttctcgggtgctctccggagtcttcaggcagagcattttgactacgctcggcatggcgtggtgcagaaagattggcccttcagtttgttgctcgatccacccccgtattctgaggagcgggtctccgaccgggtgaagcaggtggatccacccctgtattctgagcagtctgagcaggcggttggaaaacggcccagaggtatcttgtcacttcttatcgtctgtaatttgtcattcaatggctcattaatagtatctagacctatggtcaatgtcacctgacgatgaaagacgaaaaagactgctccttacatcccctgaaccactaggctctcccacggaagtcaatacaccgagtactacacactccccgtcggcctcaatccgtcccacgtactttacgcatacttcctcccctggccgcacaaagcgtaacagacttgcgcgccttgaagatgaacttcgtggtgcttccgatgactggatccgccaacttttaatccgattaggacgggaacatctgctggccacaccacaagatgtagacagtgaccggccatccgagtctgagaaagttagatttgccaatgttgggatgatggagagccaccttaaacaatatgtcgatgaaatgattgagcgccgtctcaaatcacatattgtcgacgagattgtcgatagagccgtgagcgagtgtcgtgaacagatcttcgacgaatgcaaaatgcatgaagccggactgggtgaaaaggtcgacgacgctaactccgagatacacaatacggccaatgagtgtatgaaggaaatagaagcacaagcgcaaaagcacatgggcgacatagaagaacacgcgcaacagtacatgaatgatatcgaggatcagggagtcgagatcgaaatgtccgcggagaaaaatgccgccaagctcaagcgctggttcaattctgcccagtccctacttgatagcaagtccgagccgggcacgaaggctagacgcatttccatttgatttggtacttatctttcttaggatcgtcgtcgtgcacttagattttttattagtctggaaaggtaggtgatgaacgtatttctaaacgagcaggcctgccaaatttggtcctgggtgcttaattactatatttacgctaagatgcgggggtcagatgagttgattcttacggagtaatgcttaacagaattatatatcgggcacaacacaacgcagtcactatcgcggtccccgaccccttctacacatacccaccgaccacatttggggtgtaaaaatgcaaagtgcagtacaagtggctagaaattgctgcgggggacaatttttgtatgggggtgggccgtgcacgaccatttcaccatacaaagtgggccactttctccaaaagctgagtgacatttcgacaatcggctcagcgaactggcgaatcctgaaatttaaagctgcagccctgtcaacgcagctttctgtattagacacacgcgacttgaattttgccatgatcaactctcaagacaggttctagtccgaaggccagaactactgcggcaacgaaggtcgatatgatgttactggtgtcgcctttacactctacgagctcatcacgaacgatacttccttctcggatatcccctattgggatcgacatatagacatggtgcaaagtattgaatggatcgtcaatcgcgaacttgattcttgacgtatcgaagtttcgcaacttcttgagcgaatgggtagcaacgcgaagatccgacggggatatggaaaggtatctcaaagcaccacagcgatttatatggccggacctaccaacatcgcccgaccacgatgtaccattcgagataggcacaacctagaatggaaagccacactggatgactggccaccggtctagattcaccgcaatggagatggggcaatattgctttcgctgggagaggccaccacggagccgctcgtcactcgaggctggaaatagtgtatagtcgatcagaatactggactgcgaaatgaagatactttcaaatgattggcttcaatcttgtgtactcattacctagtcccgtggctgtcaaagagtggaaccacacggtaaaatgatcccatagttcataaaatattctggcatcctgacattatgacttcaaagattctatgctagatttgatagtgtgtgccgacttttccagctcccgactttcttcttcagacagcttgatgtcgataacatggtgggccccggttcggtttacctttttcggcatgctcaacgcgatttcactcacgcctgcaaaggttccagccgttgacacagtcataagcgtgttctcattcctgagtatagtctccacgatcctcaccaagccagcagagataccatagtccgtcatgcctttcagcttgattatctcataagcagcattcctggtgtcttggaatgattgtttcatgatatcctttgcatcctgaccagcctgctgggaaaactccgccaacgggatacctgatatattggcccgcgaccacactggcaattcgctatcaccatgctccccaacaacgtctgcatgaatgttactcgggtcaacatccaatcgtcggcctagagtgtcgcgcaagcgtgcggtgtccagaacggtaccggacccgatcacgcggctcggcgggaacccagacaatttccagctcaggaaggtcaagacatcgactgggttactcgctataagaaggatggtggacggggccatttgcgtgacttttggaacaatgtcctcgatgattttggcattgatccgtaagagatccaaccgcgactgtccgggcttctggtttgcgccagctgtgattatgacaatcgctgcctcagagcagtcttcaagatcaccaagtgtgatcttggtctggtgtgagaagggagctgcatggttcaagtccattacttctccttcggccttgcgtcgattaaggtcgatcaggacgatttcggctgcgagaccactcagaagaagagcgtaagcggtagaagccccgacattgcctgcgccgacgatggcgattttgaccggcttttgtaatcagtatgggttcaatgcatttatcaagtgaggcttcaaaactaacatggagatcgatggcaattgtaggcttctttgaagaatttcgggctgaattggattgcattgtgtgtagagctttgttttgattgcttgctgattgctttctgatttgactattagatatgatatcaatcgcgactatttatagtcaaacctcctccgtagatcgaacttgcccctgaagtgaaacgagtcaacacgtcacataattgaagctctagaatccatagagcttctcaattgtgtcatgtacagacgcatgacgaaacaaatatttttgccacggcatgatcttgctcattgactttgttttcgtcgatcaaaatggctgatatctatggagtttactcggtatatcctgttccgtctcggccgacgtggctgaagagatccaaggtagatgaactgaacttgcaattacacagacggttataaaaaagtcgatacgcatccaagaaagatgaagcagtctcatgagaactcccttcgaaacctcaattgaacattacaaaagccgttaaaatgagaatcgccgtgttcagtgcccagccctatgacaaggcatcgctggatcagtctaaccaggcattcaagcatgagatcacctatcacgaggcaggtctaagcgagaagactgctcttctggcctcgggcttcccagccatctgcgtgttcgtcaacgaccagatcaacgccaatgtgattcacaagctggcggagcatggcactcggttgatagccctccgatgcgcgggattcaacaacgtggatctcgctgctgccaaaaaggcggggatcacggtggtgcgcgtccctgcatattcacccaatgcagtggcggaatacacactcgggctggttctttgtctagaacggaaaatccacaaagcctggctacgcgttcgggaggaaaactttgcactcaatggccttctcggtacagacctctacggtcggacgatcggaattgttggtgctggtcggatcggctcgttggtcgctcgatctttccgcgccggccttggttgtgaagttcttgcgtgcgatatcgttcagaatcctgagctggtttccatcggcgtcaagtacgtgagcaaggaagagctacttcgacaagctgatgtcatttgtctacattgtcctttgacgccagacactcggcatctgcttaactcggatactcttcggatcaccaagccaggtgtcaccatagtcaataccggccgcggggcattgattgattttgtcgctctgcttgacggactggaaagtgggcatgtcgggggtgcagcgctggacgtttatgaatacgaaaagccgctgttcttccgcgatttatctgagcagatagtttcagaccacaccttccggcggctgatcaccctccccaatgttatcgttacaggtcatcaggcgttcttttcccgtcaagctcttgagtcgatcgccaacacaacgctttcaagcgttggtcaattcgaaaagaacggtcaagtggagaaaagcgtgacgctctgagttagttcagtgtgaacttgacgcggactagattcagccctgtcatttacttgtctatttacttcgtggatctttatgaactaaaagttgtttcataatatacaagatcaaatccaaaaaaatatcgtctacccagataaatgcctccagatgctctagcacagtttaaaagccataatacaacaaacaaatatggatcttaaacatttccagtcccatcaaactaataccaaaataccttggagaatgaagccgtagatctctcataggaggttgtacatcgaaaatcgccacatagctcactatccttggaacgtcttcggccgaatcagacgttttcggtgctgcatcacaccacgtgtagacgtcaaagaaactttataccaatgagcttcagcttggaactgcggttgacggcggtgctggagaggttcacttacatcggtggctagctatatccctcagccttaccacgtcatagacaactataagcggaagcacaatgtgtatagtcaggctcttaatcatgcgtgtcagagcatatgacatgtatgattcacgattgttctagatcgagataatagggagcctaccacgtcatagacaactataagcggaagcacaatgtgtatagtcaggctcttaatcatgcgtgtcagagcatatgacatgtatgattcacgattgttctagatcgagataatagggagcctaccacgtcatagacaactataagcggaagcacaatgtgtatagtcaggctcttaatcatgcgtgtcagagcatatgacatgtatgattcacgattgttctagatcgagataatagggagctctagaacattgtacttggcagcttgtgccgcgaaacagatttaaatactgtgccttgaacgcgggcacaattctattatcaagtcaatccatattatttttcaattattttctacaatatcacgaacctgttcaccataaatcaccatgactacagtcggaagctatctagccacccgactggctcagattggtatcgagaggcacttcgtagtgccgggtgactataacttgatcctgttggacaaactgcaacaggaacccagtctaaacgagatcaactgcacaaatgaattgaactgctccatggccgctgaaggctacgcacgagccaagggcgtcgctgcatgtgtcgtcacctacagcgtcggtgctttctcagctttcaacggcattgggagtgcctatggtgaaaacctccctgtcattctcatcagtggttcacccaacaccaatgattcaggtgacttcaacctacttcaccacacgctcgggactcatgactttgagtatcagttgcaaatggcgaaaaagatcacggtcgctgcggtttcaattcgtcgcgccttggatgcgccgaaactgatcgactttaccatccgcaaagcactccgtactaagaaacctgtatacatcgagattcctacaaatttgtccaaccaaccgtgtgcgcccccgggaccaccgtcggtcatcttggagcctctccatagtgaccctgccgttctgaaggaggctgttcacaagacagccacctttttgtcacaaaaaagtaagattacgatcttggttggtccaaaagtcaggtctgccaaagccgagggcgctctccgagactttgcggaagcattgggctgcgcggtggcagtgatgcctagtgccaagtcattctttccggagaatcatccccagttcgctggagtttactggggtctcgccagcacgctgggtgctgagtccatcgtggactggtccgacgtgatcgtctgcgttggaacagtctttaccgactatagcaccgtcggctggacgagcgagccgaccgattctatacgcgtgacggccgacgttgaccaggttcagctcccgggagcagaatactctcgcgtctacttgaaagagtttctgtctggactgtcacatctggtgaagaaagacccggcaacaatgctggaatataaacggttgagcccagccgagccaagtctgactgccagtcatacgaatgaaaagctcacacgaaaggagatgtgtctgcagatccagaatatcgtcacctcgaagacaaccctctttgctgataccggcgatgcttggttcgatgctattaaaatgcggcttcccgaaggaaccagattggaggttgagatgcaatggggtcacattggatggtccatccccgcatcccttggctatgccgttgggcaccccgataggcaagtgatcacgctggtcggggatgggtcattccaaatgacagcgcaggaagtatcgcaactgaccagactgcgcattcccgttactatattcctcatcaacaacattggatacaccattgaggtcgagattcatgatgggatttacaacaacatcaagaactgggactatgccgcgttcgtagagtcgttcaatgcgaaagatgggcatggccgcggtttccgcgccaccactacaggagagcttcgtgcggctatcgaagcagcgaaaaagaaccgacacggaccgactctaattgagtgtgccatcgaccgtgacgactgcagcaaggagttgattagctggggccatttcgtggctgcagctaatggtcgtgctcccaaggcataggaatttttgatgcgttatttgtcataatttgtattcgtcattaatatggctgagtacacgaagtatactttcctaatctggcagaaaatgaatgttaccacgtcttgtcttctagagctactccgtatggcttccttccttggtaagtgtttctgctgcgctattccctttttagaaagtgacatcatggcggtgtggactcgacttgaacgcgaacctcgtaaaccaacccccttcttccgcattgcatcagaacctaccctgaaaatggaagagcaaattcgacagatccgtgggcatatcaagagtcagattccagacaccatcaacgacttcctcgaaacggttggaacaacaacaatacgaatacttggcgacactcgacattggagattagccgagttccatacgccgatttgcgtcaacggtcgagaattcggttcgtgtaagccagccgaacgctgaaacttgtttcctcgccgtgaacatatacccacagaagcactcttattcgtgctcttattcgtgctcgatgtcaacaatgtcgactatatctatgagactgcccacaatggcatgaccacaataccagtctatgatcttcgcttgtcgaagagtagaatcagcaattctcagagaaggaacgctagaggctaatattgctaatacctagcaataatgcacaatgggcacgggcatgacccttgcctttggttgacgattacaacgacgtttgtcctccgatacaaaacccccgcaaccttttgtctcgatgacttgaccaagatgctcctgacccagaggaaagagtattccagcactattcaagcactattcaagcttagtgggtcttctcgatatattcacatgggggtgttatgaggcaagatagtggtgctgtgtcacccgagatctgacctcgaagacagattctaggaagatttttatttaagaagcatcagcttggcgtgagaaaaagctttgcaaacctctttggtctggtatgatgacacttatgctttaaatcaatttccatcgcaaactgttctttgtggagaaatcgattatcaaagaagcactgagtacggtacagtaggtcgttgagtgcatttggtcttggtcgaaagcccaaagggtcaactcacgtgcagcagcaccagctataaatgacaatcaatctcctttcatctctctcccactactcactttctccatctaccaaacattattcccaaccacagctctgttctcagacagctcttactcaatccaccttcaagtttgctattatcgacatggctaaagagccaaccacccctaaggccaaggcgaccaaaccggtcaagacaggaggaattgcaaagcgaactccggtcaaagcctctcctgccaaagcctcccctgccaggatctcgctcgctatcattgataaggacgtgatcttcttgtggaaatgtatcaagactagcagcatgaaggcaagtgtctcagatatcttgatacgtctgattaaacacactatagcatgtcaatactgactaggttgtcttacagattgactggaatgctgtcgccaaagagacgggcaagtcgacttcaaccttgcagaagcagttctcgcgacttaaccagaagcttgagaagaatgttaaagttgccgcccccgatgcttcctccgacaaagatgccaatgaggatgttatggttggcgcatctaaagattctgactagatggatcgtgatttcggcggcaatgcagaggtgacgcgacgagggaagacaggctcggtataggagttttgtgttcgtggtcattttcctcgtgattttcactaccgcctcatttgcttttcttcaatttcttattctctttcttgggtcaacatgtgcccctcggtatttttacttgtgacggcagcatcttggcgaagatgactgtgacggtctgagagccttcttaatccaatgaactttataaatttattttaccctaaatttcatagagaacactagtaaatgttggctggtaaacaaggtcttaagacattcaaagtgacattgaagttgttgcagtataagagccatccaaggtacccatgaatcggacaatccatgtccaactacgtcctccgatgtccaagtatgtccaagtataagccctgacacgtccaacttgaacaatccagccataagatgacctcattcctgcatattcgtccgagcccctcacctgggcatttatttaccccgccccttccagctcaacaatctacatacttcccaccttaccccgaatcatctaatccatctaattcatcatgtccaacccctatttcgatatcgaatacacctcgcccaagggccagggtaagtacacccccctatctcatcccagcgacgctaacacgcgtactagtggagaattggggccgaattgagttcaaactttatgacgacgtcgtccccaagaccgcgaccaacttccgcgccctcgcgacaggcgaaaagggcttcggctatgcgggctctgctttccaccgcgtgattgccgggttcatggcgcagggtggtgactttactcgtggaaatgtcagtcacggtatctccagggaaatctgagctccagctaatcttcactttcttctcagggaacgggcggcaagtctatctacggcgagaagtttgcggatgagaacttccagaccaagcatactaagggtggattgctctccatggcaaatgcgggacctaataccaatggttctcagttcttcatcactgtaagttggaaatgaaattgatgggagatgtcttgttctgactggattagtttgtgaaaactcctcacttggatggtaagcacgttgtcttcggagaggttgtctctggtcaggatattctcgagaagatggagagcaagagcttggatcggtctggaaagactgatggtaccattaagattgctgcttcgggaacagtctaagctattatttggaatgtgctctcttctatctacacttactgggtagtaaggcggatgtgaactcgtccatcgtctcatcgatctatgcatgccatatttttttcaagacttccatcaagttagatagaatgaatactaaaattcccggcaaataccattgccaaaaccatgcaacatcagaaagaatcagtaataatactatacacacaagtataaatcacttcacagcaaccaaaaacaaccgcggatacttcaacaacaccctcccatcaaacgaaacgggataagcagcccgcaagcgcctcaaataatccgccaaaaacgcctcctcctccccatccaccaacggctccaaaaacggcctcaaccccgtccccttaacccactcaataatcgcctcatggctctccagcgaatgataataactcgtctcaaaaacatcaacccgactacaaaccggcttcagcagatcatacagctcctgcggcgactgaaacccatctctctgcaccccagccagtttctccttccacggaccctcagcagcagtctcacgcatgagcagatgcgacggctcgttcaggttatgcggtacctggagcgcaaaaaccgcgccctcttgctgcggctgtagcagccgtttaatgaccacgatgcggtcatccgctttcagccagtggaacaccgcgttcgagaaaaagaggtcgactggcgtggctgggtcgggcgtgtacgtggacaggtctgcgatttggaagtcatggtctgggaggactttctttgcgcgcttgatcatgtccggtgatgagtctagccctgttattgttgctgatgggtattgggttgctagtactgttgttgagttgcctgggccgcagcctaggtcgattattctccttggggctgttaggggcacgtgcgataggagatcgcgggcgggctgggtgcgctcgttttcgaatttgaggtattggtttgcgctccagtctttggtttgttgggtcattgttgtggtgaagtgtctgtagactggtcttgggattgggattcttgtagagtgggtgagtaatctcgttgctgtgggattaaggcgacaaggcattgttttgatggtgttaaatactagaagatgtttggctgtatgggcaatatttgtctttatattgatatctcgtgtttaatggggtgaatcaggaagtggcaatgtcggatgttcggtgatcgctccgatatcgctatgaacagcgttgcattaaaatccagaacgatgaaggaagctggtaaatccgacatccaattaccgatatatctagctactagctaacatatgaggtacagatagataagatgaacatgatgtgcgacactacgctgcccgctttttagtggaccgaggttcgcgccttccgcatttaattacccaccaagttgcccaacaaggactcaatccaggataggacatctgcagcactaccagtggggatagatacggccgaggtagtagcggaggcatcagcgctggtagtagggacttgcgccgcagcagaagtagtcgattgacggacagtggtggcgaaagtagtaggctgggccgcaaccgtggtggtggaagtagtaggctgagcagcaactgtgatggagggcgttgtagactgaacagcggccgtggtaggggttttaacaacggcggcaactgtggtggaggacgttgtaggctgaacagcggccgtggtaggggtttcaacaacagcagcagttggggtggtagtggcggcaaccaccgtagagctggaggtcgacgagatcgacgaggttgatgaggtggacgaggtggacgcaaccgccgagctaccagatccaccgagagtgaagtcgatacacgactcgtaggtctggtcgattgattctgcgtaccagtaccactgcaacacacagtcaccggcggtggcacactggcttccaagatcgtcggggatagtgacgctgaagctggtctcgttggcagtgacgccggtggctacggacgcatagacatcccaggagatcaggggactgccaatgacagtgttggaagaagtctggacgacagagacattggccacaccggtgtgcggggcgcgaatatcaacagtgaaggcgacttcctctcctgccgtgtacgactggatgttggcctggttgtcggcgaacttgtagcccttgcacagccagatgtcacactcggcggcgttgtagtcggtctgggtggcggcaacctgtagctcgccttggatgttgccgtacttgtcggactcctggttggacagaacttgctgaccacacgcggctcccattgcagtaccgggctcgcgggctgccgggctggtgacgaagccatgggcgttgaccaaggagatgatactggcgaaagccagggcgggggtgaaagacttcatgtttagtgaattgggatgtcgggaagtgaatgaaaataatcggtaaaccggaccgatgaatgaatgtatacttgatgaacgagagtctgcacggtctcaaaccggagaaaatgaatgtgaatgtgaatggaattcaaaaaagactgaccagcatgctgaactggtcttgccacgctgctatgtcgcttcttatatagtggacatattcaaaaggaggtctacctgagctgcgacattaatcaactagaaacagtagcttaccacttaccagaggcatcatgaacagcgattaggcctggatccatgatgtatcatactgaaacacatcggatatactcaagggacagcgctcccccaccggaagggactggtcagactggcggcaagcacagggcaatatggcctcgggttcgggtgtatattgaacccgactggatgatcatctagagacgagatgttcctcaggctagggtttccaagcctggctccacgcgccgaacagggatgcgccgggtttcacgttgatggagacctcagggctgccaatggcgggtggtgacaggtgagacatggagttttatggatgcttgaagttgattaaagacgtggagatggaagaataaacatgacttggcagttctcttcggacgattttccaattccattccagaattctcccgggtagtccacttggtgctttggaaatcgaactagatccgatgaaactaaataggaagttcatgagctgtcaaggatttcacagtcaaagatcatctgatatttgctgcccaagcctttagcattggacattctcgcatatgcaataccttgtacgcaatgcctccgagtgattagcctcagctaatcccttacaggagacggagtattgtgaagtttgaagttattagcgtcggcttgccgaaattccaccaatcatgacaccggagtattttatagagctgattggcattttcccctacctaagtggctcttggatactggtctcttactctgtgcgatatgcttcaatggaaaatgatagacaatcaaacaacattcactatatactcccaccacccgtgaccgagccatccttcctcgtgtcttgtgtatggcaacagtgctgaagaaacatcagtccacctcagcttctagcgattcaatgaaagatcaaagacaatcttgcccttcgcatgcccctcatccattctcttgaatgcctcttcatactgctcaaaaggccagacgctatccaccaatccccgacacagccccttctcaagcaacttcgaaacctcctctaactgtctcctcacaggctgcatgataaagaacacatctttcacaccttcacctttaaacccctctggacagacctgcagaggtggctgatagatactcagcacaacaccatcatccttaacagtccaccacgcatcctgaagagccttccccccgacacaatcaacaacaacatccaccttattagaaggtaactgcgtagcccactccttcacattcacaacttgataatcaagcacctccttcgcaccaagagacttcacaaattccacattccgagggccacatgtcccaaccacctccgcaccaagtagcgtggccaactgcacgagccaaatgcccacaccaccagaagcagcagtgacaagaattctctttccagaccaggcaactttagcagcctcaaaactcatctctccctcatttgcaccggtaccaagagcatgaacaaaaagaatctgccaagccgtctgcgcagagacaggaactgcagcagcctggacccagcttaggcccgtaggcttatgagccagctcatccgtaacggcgatggaatactcacgcgcatttcctggccggctatagtttgtgcgtgcgtacacttcatcaccgggctggaagggcgagtcgtccggtcctgagatgacgattcccgccatgtctggacatgggattagagtgcgctctgttggtggagggaagttctttggccagaggagctcgccggcgcaagggctgcaggcttttatttggatgaggtgctctccctgtgcgtggtttggagttgggaggggtgtatttgttatggtgagggttttagaggcggcggttttttggatgatgctgaacattttggagggaagggagtctgacatgtttggcattcgaaacgttgttattcaatgaggaatgtgctggtggtgtttcgttcttgggctatatagttcaaatgttgaggcgtcatccggccggatatcccgcataggctaattgatagcctatcttggtacttggagagtatatcctaatgttgcactaaattggaactcaactaacctaaattcccgtatttctcgtatcggaaactatagctacgaatcataaatgcccgtcatattccctctcttcgacaaaattgtaaaatactacaatataggggggagatggaagatagacaacatcaactatagagcggtagatatccttttgacgattttagtgaatatgtgtgatattattcccgtttgagacaacgaggtgggctcactaggccaagcggaattctcagcaggatttccgtgaagaatacacactttacattgactcttcctattggtagacaagagtacttttgcaattccgcatgcgagtacccaggcgacatccaatccgagggctcatatcagtcggaagagatttccaccccacaatgccacacatcccagcccacagttcaagcctatggcagcggaggtttcgacgattgcattgcctaatctggcctgtgacatgcacgagcgggatgccatgtgctcctgccatgtggtccaatgcttttcgatccagtagctccgtcgagcaggttccggattctcgctctcgactttgatcgtctactctgctttttctctgaaaacactctacaatggatagaatacatactgagcccgaggatgatatcgccgtggtatgtatactgcttatctctttgatttatgtttctgacaatgttaggatcccacgacccatatcacgaccgtttacggcgatgactggcaatcgtgagtcttatctctgtgcctatatggagatctctcacacaatccagggaaaccacttcgatcggctcctcgctttatcgcgggttagaggagaatggccggcgatatcaaacattgagcaacaaggaatatctgtacgcattggcttccgaatcgaggtattgcctgcttacttcctgccaggattccatcggatgagaagcagttcgattgttacgaagctgggtatgtggaattctcttacatatggtctttgttcaaatggtaactgattattgcagccacttggtagccctcgtcatggactcagaccaagagaacccgctcttccggtcgcctgttaaagaccccaaaaacatcctcgaccttggaacaggtctgggtaactgggccatgtatgtggacctttcattttcataaaggatcactactcaccctcttctagcgatgtagccgacatgttcccaacaagtaagtccggagccccggtccaattcaccatatcaacatactaaccaaaaccccagccactgtccgcggagtcgacctcttcccaccaccagtaacatggatgccaccaaactgcatcctagaagtcgacaacatcgccgaagaatggacctggaacgaacctcaagacctaattcacatgcgcatcatgatcggatccttcagcgacgcagaatggaaacgcgtctacaagcaatgctacgagtaagcgcactttcatccccatccccagctcccataactaacccgaccccaccagcaacatcaccccaggcggctggatcgagcaactagaagcaagcccctacatcgaatgcgacgacgacagcctaccagcagacagcgtcctccgcagctggggcccatcgctatccgcatgcggcaagcgggccggtcgcccgctagaaacaatcgatacaatgcaagacgctctccgcgagactgggttcgtggatatccgtcagaaagaatacaagtggcccattggcccctgggcccgagaccagaaatacaaggaggctggcacggtcaactaccagcattggatgtccggtatggagggctgggctatgtggttgctgtgtaaattcggggcgccgcagccttggtcgcaggaggaggttattgtttatgttgcgaagctgagggcggagcttaagaatcctcgctatcatatttatcagcgcgcgtatgttttcccttccttgcttcttgtgggtgtgggctgatatttatacaggcgacgtgtgtgggcgaggaagcctttgcttgagcagggagctcaggcggagactagtgagagtgttactatcaagactgagcagtgagaggatatttcgttgttggggtaagtgaactaggttgtaggatgacatgtctgatatggcgagttgattggaatggctggacgcagccagccttggattggcgtcttgtgctttttggactctttgtaggtgctgtctatgacttcctaccaatgcattcgatcttttgcacatatatatgatagagggacaatgccctgcacaacactagaggacggagggtaagactcgcatgtatttacctcaaaggtgtgtacctagagtatgaaacgacggcgcacgctcctcttctgtgggtcaaacatactgctgaaggtgttcgcagtaaaagctaatgaatatgtgtagtaacaatgtgcgaggtatcatgggtaaagagggaaagagaactgaaagagaaaaaaaaaaccaaaggctatgcgcttgtaaaaatagacaaaaccacaaccagagttgagcgtaacaaaaagaaaaagactgggcgatgacaaaagagagagagagagacgtgctaccggcgatcactctggacctgcgaatcaaaatgcacacgattcctctcctccgattcattcgtggcatagtcatccgcgaatgggttccgcacctggaaatcctcaggcttgtattcatatcggctattagtcgtagatcccccgacaggattggaattgagtgaatgggaagcaagtggccgaccaccagtcatagtcggagaaggcagctgtgccggggattcggagctgcgcgttgaaatgccagctggcgccacggggggaggagagaaattcgtaactcctggcgcgacaacctgcgacgtcggtgaagggctattcaaattggacgagctgggcgacgaagatcctctgatcttgcgcgccttcagcatggcacgctgctgttgcgacagcgccacggagatctcttcgtttgtctcaataagcgtcaacaaggtgtcctcgtccggagccgggttggtcgcgtggatatatccttgaacaacacgcgaaccggtcgtgcagcggtcaacaaactccttgatgagatcgttgtcttccagctctatcggcggcgtggactggacgaattgcgtgagcagcttggccgaattgcgcgcctcctcgatacgggccgctagttccaccggcgtggggagggtatttgtcggcgcgcgggacaggccgtatggctgttggtgagggcgagacctaggcgggactcgcggtgggacgacggaattccttgggaaacggtcgatctggctaggttagtcttggacggcgggcacgcaaggtgactatgatgtactcaccagaccgtgagaggcttttgtcttctccttcgcccacatctgaagcagcagtttgagatcttcgtcccatgcgcgttcttgctcgaggctatccagatactggcggagatagctctgcacgttccagtcgcgtcctgtccgcagcagctccttgacggttgtcacgaatttggcatcgaagttgcgtgtgaaggtgtgccccgggttgtcggccaggatgcgcatgagcatgatcgcattgtactgggtgtggttcggggtaccggcggggtcggtgagatacttgcgaatgcgcaaagccgcttccttagcggcattggggctcgactcggcagtttcgacgatttgagggaggtaaacgaattcagttccttgctggagtgtgcgaatcggttgtcagtctcgaaaagggggtgtgttatcatctccgaggcacgtaccgcgtcgtgcgaagatccatccgcattcacattctgattcgattcgcagaaggcagtctggagatgtcagtgtgccttgttcaatctctcgagactaagcacaaaccaatgcttgcaggacaacggcttctggtgagtcttcgctgtattcgacactgtcgctggagcctattttcaggtacaaatcagtaatttgcggggagacgtggagaggagacactcacttgagcgcctgctcagagatcccaggaagcgcttcatggtgatcgcacagtcgcttgtttttggggagggtttttgaaagggaagaaagggatcaaattgctaaagaataatcctagtaggggcccaactgcttcgaactagtatggaactagcaataggtgccctcgctagttgatcaataaaaccgagcagtgagatatatataagtcaatgtccccagcgatcaacgctaccttccacgcacgcatccagataatctgcattgccaagctgagtgccatcaggctccaggcaattaatctcacctgcccagggatccatgatgttttgaccctggtgactcagccacgaacgaaggtaggtagacggtacattgtttcgatacgcattggccatatctttagaagtaccaagtacttagtatcgtatctactctgcttcaacagcatctgccatctcccccagtgtcttaaaccgccaatcaaagatcggatccgccgaattccccatcaaagccccaggccgctcaatccaaaccgacttaatgccgaccttcctcgcaggttgatgatcatggaactggctctgcgccgtctgcagaacctgtccaggctcaaccccaaactcacgctgcacagcactcaacataaactcaaagttccgtggatccggcttgtaactgccaatatcctgcgcggtaaggatcatatcaaacggtacaccctgcaagctgccggcattggacttggcgaatgaagcccggtccacgttcgacagcaccaccagcttgtagtgctttgacagtcggcggagggcgtcgacggtgtctgggaaggccggccaggttccgacggagttgccgaattggcgactttcctcgtccgttggcgggttgaggcctaggcgcgcggcgagggtggggtggattgctgctagcaggtctgagtatggaaggtccggggttgcggtttgttgggtgctctcaagctggtggtaggttgttagaaggtgttcacgggtgaattgggtgctgcttttcgagaggattggtgccaatgcatcgatgatgccgctttcccagtcgattagagtgccgtagacgtcgaagcagaggaggcggtagtctgataggctggtcattttgggttgatcgtgatatatatagggagatggagtagattggatgagggaatctcgaagtgtattctgtttggactacagagtacttatacccccgcatttagatccctgcttatagattaaggaccttggcatgttcctttcccagataaggattgccggggactgaaagtggtataggtaggatttcctcaagattccatatctaccaataaaatccttcaagtgcatatagaggtgaacccgtaattccaaacaccgagatatccactcatcgttacgatagatcaatagatcagataatgcatataaaacagaaaaaataagatcacattatatgaccgaaagatcgaaacctcgacagaggtgtgcagctaaacaagacagaaatggaacactctctatcaaagaaaaatcactcgatagagtcacggagaaagaaccacgtttgtatcatgattggatcgggaagtacagaatcctatttccatcatcctgggccatatcgtttaaactttttattgggttctcctccgagtgttggcatgaccttaaaatcttgtatgatccggtatcgagtccgttccaacatacacagctgatgcacagaactccgatccttcccgtccaccgcaaaaatcttttcacattgcgtaaccacacgtcccctcacaccttcttatggcgatccgtttatgcctcgatgagagcacggcggatctgggtgccacgctggcgggaagagaggcggacctgcttgtcggtgctggccttcttgacctcctcggcagcctcggtgaggatgagctcgatgtggcaggggttggtcatgtaggggttgatctggaaagaaaaggtcagcatttggataccgactcaaccgtacatattaataaaacgtacacgaccgtgagcacggtaagtgcggcggcgacccttgggagcctggttgacctggatgcgcttgatgatcagagcgctggtgtcgagacccttgccatcggcgttggcctcggcgttcttgagcagatcgatgatgtgctcagcggacttcacgggccagcgggccttggagacaccgaactgctttcctgtaaaccgaaaattgtcagtcgatgttcgactccattcacaaattttcatccagattgtagaatgcacagcatcgccaataagccaagaaatccatcctcgtaatccattcatattttcctcgtcatttcaattcatatcccagtggctgtcgtatattggcgatgctattcgtcctccccacaatccgaaactccaatccatccggaaatttcttcaaaagggcgactcaccctgagcagtgcgaccggtggagccagcgtagcggcgcatgggaacggccatggtcttcttggtaacgttctcgaggaaagtgagggccttggacagcttcatgccgttgacggcctgggcagtctcacgggtgttcttgaagctgacacggaggtaagagccgcgcgcgcgggcgctcttggcctccgagatctcctgtgcggcgtaacggacctgtgaaaagcatcgctcgttagcaatgggatcgtcgttgggtgttggtgatgtagcgaaagtcgacccggcgatcggacattgaatgtgcatcacacaagtggcatttcgtagagaatgggattgcgaaaggtcattatcgatgacagggacatgcagcactcaccatcttgaaggagttggcgaggggggtgtgatggtcctcggtgatgagttgttgtcgcttttcgtcgtcgtccggctctcgcttgagccactagatttggtgcggtttttttcgctcttggcgctctggccctaagcgagccctaacgctagccgttttgggtggattacttttgagttatgtcagagcttagtcattgatttctgccccacatctcagccttgaggttcactggtgcaatcaactaaggtgaacatcttaagttgcaactatacttcataaactgatcattgatgattgaacggaaaaattttattcttcataaatccatatctatataccctattttgtctatttcttctgctctggaacctgtgtaataagctcacccttctcaacagccgaccgcatgttatccagcaccagaatctccatatccttctgtgtctcataagtgccagtaccaatgtgcggcagcaacataacattagggttgctgacgagcccgggctcaatttccggctcgcactcatacacatccaggccagcagagcgcacctatagaacagccaccagtcagccgcatatccatcatggaagttgaagttcaacgcagcaaatacataccttgccagagtcaagtgccgcaaccaacgccttctcatcaattagcgcaccacgggccgtgttaacaatcacaacgccatccttcatcttggtgaactcattagcaccaatgatgtggcgcgtggatgcgttcaaggccaagttcaagctgagtacgtccgaattggcgagcaactcgtcgaatgagacgtatgtcgcgccggcttccagctctggtgatagacgggaccggttgtggtactggatcttcatcccgaaggccttggcgcgaattgccatttcctgctcatggttagctgtggtcaggtggtatattactgtctgtgctacatacccgtccgatgcctcccatgcccagaattccgaggatcttgtccttggggtcgtggcccagggtagtgctgtactgctttcctcctgcggtgatcgggccttgccactttcctgttggaggaattatggttagtcaccgaatactgggaaagaatatcattccgctctggttagccacttaccttcccggagagcagtaataggcacgtaagcctggcgcagagcgccgatcatcaggaaaatgccaacgtcggctgtcgcgttgttgaccgcaactggggtgctggacactgcgatgttcttctccgtgcaggcggcaacatcgatgttgtcatatcctgcgccgttgtgacagacgtacttgagagatttaggcaggactgcgagcaactctgcgttgaacggaccggtgtactatgcgttgtcagtcggatcactcgaagtgaaaggtcaggccggtatctaccttggtggagctgttggaccggtagaggacgactacatcgtcatacttgccagccttgcagtttgcgatgaactcttctctggttccgctggggaattcctagttgtctattgagcaagattcggtcgcggcgcaatacgaatcacttaccttcaacgtcaagaatgatgagaggctctcccattccttgcgcgcgtgtgtgatttctccaatgaggagagctgattgtgttgccatgttgctggtaacgttagatgcgccaaatgatgtcagcggggttgctcacatttgtaaaagttctatagggatgtatcaagaaaggattgagggattgaagcgagcaatgagaagattagcaactgagaatgaaaagaaagaagaatttccaagattccagaaatcaagagatcattggaggttcaaatgtccccgctatcgcataacccccatgtcgtaacgggggctcctccgacagtgtcgtggatatagatgtacgggttttatagatcgtattcatacttatacctcaacctagaacttttctactcaatttctacatttatctgtttatacaacgattatcattaacttcatctcttcacttattactccttgatcttctaccaagtgcaaattcaagaatcatcacccccacgtcggctatccaaatctcccctttggtgcaataaccgacagcggagcacctccgggcccaagactttccccccacgacgaccaagtggggtgttttggatgtgtagaggggcaccaacgggccgagttgactccaaatgccgtcagaggtcgggtttcgctacttcttcgctatttacttcaatcctttcttttattctctctgaaactattacctactactctctacacgatatacacactatggcaagcacaaccaccaccgcgctcgttctccacggcgccaaagacctccgcctagtaagtaactccaaataataaccaactcggaccaaactaacccaaacccaggaacaacgcgccatcacccccccatctacaaacgaagtccaagtcgccatccgcgcaacaggaatctgcggctcagacctccactactacagccacggacgcaatggcgacttcgtcgtgcgggcaccaatgtgtctaggccacgaatccgccggcacagtaacagccatcggcagcgccgtgacaaccctgaaagtcggcgaccgcgtcgctctggaagtcggcctcccatgccgcaaatgcgcgctctgcaaacaaggccgctacaacatctgcaaagccatgcaattccgcagctcagcaaaagccttcccccacctcgacggcacgctgatggagcgcacaaaccacccagcagacatgtgccacctgctcccagacagcgtgagcgacgcaggtggtgcgctcgtcgagccgctcgccgtcacgctgcacgctgtgcgtcgctcacacccgccgagcaaggcggaggttgagcagaactgctccgctggagaggagaccccggcgctggttttcggtgctggcgctatcggcctgctgcttgctggcgcgctggcggctagtgagaatttctccgcgattgtcgttgcggatatcgatgcgcggagactcaagatcgcggaggatatggggcttggtcttaagacggcgcttattcccaggtctgagactccgcctccgccgaaggatgcgccgcatgctgagcagacagcttatgcgctggagaatgcgcaggtggttgccgctgcgttgattaaagccgtcggtgcgaaggatggactcattgtgaacgggttcagtcgtgtttatgactgtactggtgtgccggcttgcgtgcaggcgggtatttatgctagtgcgcctggtggtgtgctggtgcagattggtatgggaaatcctatccagacgctgcctgttggtgcggccgcgctgcgcgaggtcgatatcattggtgtgttccgttatgatggatctgcgtaccccgctgctattgcgctgctggcgagtggaaagatgcagagtgttcaggagaaggtcgttacccatagactcaagttggaggagggggagcgggcgtttacacttgccgggaagggagttgatgaggaggggaaccctgttgtaaaggttattattgagagccgacggggctctaatggctctctgtaaatttgctgatgaggacgacggcgatgatgatgattgtgtttgaaaatacccgaattgtgacaatagcaaaaagatggatatatatgtggagaggattatgaacaaaattgcatatacaaagttgaggtgatgatcgtgataacttgtagggcgctaaggccatgagatagatttccacttcttatactattcttcataatattgggttgctcatttcaaccctccagccagcaaaagactctgacccgtcatgtagcctgttttcacaagcatagtcacaacattggccgtttcctcgggagtcccgaggcgaccaagcggaatcccagctgccacctcagggatagccgcagcgttaggaatcataccagtgtcaccaatcatggcaggcgccacatcgttaacactgatattgaattcagccagtcgggtagaaaggttcttcatcatgcctgtcagaccacctttagaggcagcgtaatctaaaagagagtcagtttggtattcctcagagaaggaaagaagctatacatacgacatccattgattccaccaccttgcgcagcaatcgaggacataaacacaatacgcccccaattctggctcttcatatgctccaccacccccttgacgagaatgaatgaagcgcgcaagttgacatgtatagtatgatcgaactcttcgagagagcagtcccagatctggggaatccgcttcccgtgcccagcgttcgagatcaggatatcaggtcggtggcggtgctcggtgtcgatttgctggaacatcgtctcgatgtcgtcagcggaacctacgtccactttatgaattgagatatggagctttttatctgcgtatttgctctgcaggtcggtcaccagtgcgttcatggcggtcaggttgctcgcgtatgtcagggcgagatgcactccatgttgagcaagctggtgtgcacaggcagatccaattctatagaattaattgtcagttcttcattcgccgtattggggtgatatgagttggaatagcttaccctcccgatgcgccggtaatgagcgcaagccgaccctggatctcgttaagtgacatgatgcgacggagttgatacgtatgttgacgatatgcaatgatcaagcgcagatgtaaactcttaaacctccaagtttgatctggcaaagaactgcgttgctggcctcggttacccctcggcgccatctccgagggtaaacccccgcaaagccccgcatcatttgccgtcagatttgggggtgggggtgtcacatcataagtaccacacggataaagccattaccaagcatttaaaagagaaggttgctgctcatatctcccatccaagcagacggctgccaagtctgcgagcgtggctctccagattggtacatatcggaggcattctggaacgcatctagccccaacaagccaccagaaatctggtccccggatacataatcgcccacggcctccaaatctagccatgagaagtcattcgcagggctgaatttcatgtatcccgggtctgtgactgggttcggaagggatgtttgtagtgggaagtcactattttgcgtctcttcggttgggttcgatgtggacttgggcttccatagaagctctagaaggcgagcatagcgcgacccgatgtcatcagtgccggcgcttgcttgtttgagcacttcagtggttcggatgactaggccttggacttttgcttcttctgatgggaccatcattccgaatgaacgagcctatgatatcgcttagatgatatccagaagagggattgaataggaatcttaccttgtagaggaaaacggcagagtagatgccatatctaaatcgcatgagctgtttgcctcgaaataacacgcgacgaaagaaaaacttacaggtagaagcggagaggcatgaagtggagatgcttctcaggatctaccagatccaccaagattgtcaagtatgacttggccgcatcaacggattcatagatgaaccgcgaatcctgcatcgaagctacattcttgaatgtcgatcgtagatgttctcgctggttttgtaggtctgttttcggtttgacgagcgactgcgagatcgcagcttggaacgcgaaagcagttgtatacagacgcaaatactcgtatgacaactgcagtgttgctcgcataggtggtgagcctagatatgttagaaccaacatacccagcagctcaaataatcgagaaaaggccaacttacagtccaatgacccccaaagtgacttccaccgcagaatcgccagacggaagtcatccacatatttaacatagtctcccatcagcatcatctggttactagtacgcatccccgaatataaaacctcgtgaacattcccatagagctgcgtaagatccaacatagcctgaaagatcttcgcatagtcctcctcgccctcgttaaccggctgcagcgatggaaaatcctgactgacaagaccagtcatgggcccggggccacgagaccagaaagcacgtccaatacgcacagaaatcaatcgatcagagacatagcagctcgcccaggccagacgtctccgtgcctcactctcatggtccccataaggatccccacggaaagacgtgcgatccatgccgatgaaataccccgagcgcaacgcaagcccgacatgcatccacgccgcgcggtcttcctctccgcgcccaacgcgttcaatgcgaggccgcagtccctgaggttcccactcggcgagtaagagaagcgcttcgaccgcttcaacatcacattctgcgccagcggcgatgccggaaatcagctcgtgcatgtacttcgagcagtactcgtggatctcgggttggtcgaccaaatccttggaggcgatcgtcaggactgcggtgagcaggtgcttctcattggcggcgaatgcgtctagcgctgcgcgtgtgaaatacttccgcggcacaaggggaagatactggtggaagttctccgcgtagcgggaaatcagttgccacaccgtttccgggtctagggcgcacgactggacaagtctgtaggccctgatgccagtggttgggttgttgaagtctgagacgccgttgcgcaggctgttgtatactgggaatggtgttggctccgaccgaacatgttcattgcggatctcgggagcgatctctgtgccttccgtggcgatgccggtcaagcattgccatgcgtctgatggattgcgcgggacagacgatatcgaggtatcatcttcctcgacggatgccgatgctggcgccggtggattaggtggcaaaaagactagcgggccaggataggatgccgattgcactcgacgattttccgagttggttgggcttgagacttccgaatccttgcctggtgagcgattgaccggtgtaaagttcttgattttgttcttccggattcgacgacctccacgatttgagccgcctaatatgcactcgcggttttcgcgtacacaacgctggcatggtggtttgccgggtttcccattagagtctctgcatgcgatcagcgcggaaccatctatattgcagatgcggggaaagactgcaaggatcgtggccgaaacgagaagaaaagacaatcttacaggtcacatcgagacttgcgttgtctgcaatgcaaacaggctcgcgaaacgcgtttggcgatatcgcgccgtgaggcttctgacggggattcttcttccatggctacaggaacattgaagagtacgaaatcaaagtcggacgtccccacaaagaattccgaagacccttactcatcgccatgctcctctccatgtgggggatgcgggaccttgtggttaaacgttttacctacttttgcctctatggtcattctctaagaacttgatattaactgctttgaatgttagatactatatcagacattgtttctcttcatatgcttatttaatagccccttcatctgttcaagtagggaaaaccacttaccgtgtcaatagccgacggctaatgctctcggctattggtattgcccggagtaaccccgcgttctcggtttggtctgattgggtttcttatttggagctcctcccatttgcttctttgcttctttggttcttttattttggatttgattccttttcatattcatattcacattcacaatggcagacgtgatgtccctattctccctaagcgggaaaaccgccctcgtcactggtggaactcgaggtattggccaagctatggcctttgccttggctgaagccggcgccgatgttatcttggttcaggtgagttatttacacgcaaatattggagagcacatgctaatatactaatagagagacaccagcaacacagcaaccaaagatgagatcattaatcgcatcggccgtaaggcatggatccatgtcgccgagctcggggatcggaaagccgtcaaagcaatcatccccgcattgcttagccaaggactgaagccggagattttggtgaactgtgcagggatccaacggcgacacccggccgaaaagttcccggacgaggactgggacgaggtgagtcgataaagcaatataaattgcccccttgaaacactatatctaattcgtggaataatgtataggtcttggaaatcaacctgtcctccgtgttcatcatgtgccgagaatttgccgcatacctcctagctcgcgacgcctctgaattcccacagggtcgccgaggctccatcattaatgtcggctctctgctcaccttccagggtggaattacagtccccgcctatgcggcatccaagggtggcattgggcagttgaccaaagctctatcgaatgactgggtcgccaagggaatcaatgtcaacgccatcgcgcccggttatattgccaccgatatgaacaccgcccttatcaacgatgcggaccgcaacgccggtatcatggcccgtattcctgctggccgatggggaaaccccgaggatttcaagggtgccgtggtgtatctggctagtcgggctagcagctatgtttctggagagatcctcacagttgacggtggatggatgggacggtaaatgtttggaaatgaatataacgtacattacttcgataaattgcacatataaatgaattcttttggcttgtcaggtgtcatgagactattgccagactagttaactatcgggttattgcctgtaagagggaagaggtaacagtggcccgtgcgtccacttgaaacctcgacaacgccaatgtcttacagtcaaaccacctcagccctggagagacgaatggcacatgtcggcttgtgaaagtggcataattaataatgtctcagacttcatacactatcgtccaaggcgtcacgcccagactcgaactaggatcaacaaggatcgtcagcaaatcatcagcaaatcacacctatctcagggggccgctaaggcttgttagaaacaccggcgtctttagtgtcaccaaggagctatcccgataggtttttcggcaatttaaacgcctcgaacagctgcaaatcagaccatataggggctttgcggaagatatgtccatcggggtccatgcttcttctcaaaactctttcagggaggcttcttccacttccatttcttccattattcgcactcttttgtcttagaagacaatcggctggtctcgattgttaaatacactctctttactatattgtctggtctggactgcctctatattgtccaatttcattcttaaaaaggaaaaaggtgccccttgcctgcatgccagatacctgaaagtgaatctccaacgtcgattcttggtgacgtgccagtttctcacaaattccaaaagagcagggctgttttggctcgctttgttgacttcaacctggtcattcactttgagacaaacctcattgttcattgtcaaccccaaacagaaccagccacaatgctcgcgttataagacattgtctttgtcggaaacaatcaaagaggtctccatctatatcgacgcactttctccaaccctgtttataatccatttcatctgatctatccaccgtattcgacttcgattccccgcaaacgcccacatccaacatctcaatctttacattttgatctcggctgttgagcagctgcttgaaacatacacatacacattgctatatcgactaggcggttgtgcaacatcgacagcacagccttgcatgtttgctgcccagaccgcaacttctttctctcttcgatatctgcgcctgttcaatggcagcaacccatccgcatatcgcggcacgagggtacgggtcaaacgccacatacatatatgagtactcaagggggctgggtggcgtggacgtccctcgcgatgtgatctttacccggatcatctacggttccctgtgtgtcgtggcattcgcactgttctgtggccgagtcgcccagatcagccacgcatatctccgccaaatcaccgcaactagcgcaagcaaacaccagcagaccttctgggcccaggaacaatcaacatggtggtcaaacatcaagaaatacatcctatacgccccattaggaagcaagagacacaatcgagagttacagctttcttccgctgtcaatgtcggcactttaccctcccggctgcagactatcttggtcgcactctacttcgccagccaagtcgcatactgcttcatcctggactatagcgtcaaccacaaggcggccttggtcgccgaactgcgcggccgatccgggacgctggccgtcctcaacatgatcccgctcttcctcctcgccggccgaaacaaccccttgatcccactcctccacatcagctttgacacatacaacctcctccaccgctggctgggccgcatcgttgtcattgaatcagtcgcacacacagccgcatgggccgtcaacgccgttgacgaggaagacttcacccgcatgctcgctcgcgtacgtgaaacccccttcttcctctggggcctcatcggcacagtcgcaatggtcttcctctgcctgcactccccctcacccatccgccacgccttctatgagaccttcctacacctgcaccaactcgccgcagtgttcgccttcctaggcgtgtacctgcacctgcagatagacaacctcccgcagcaaagctgggcgaaagcgatagccggaatctggataggcgaccgactcgcgcgcctcttccgcctcatccacctcaacatctcaaccaccggcacaacaaaaatggtcgtgcaagccctcccaggcgaagcctgccgcgtgaccttccacctcccaaaagtcgtgaacatcgacccaggctgccacgtcttcgcctacatccccaggatctcctggtggatgtcgcacccattctcaatcgcatgggccgaaccaagcacaagcagcacatcgacattctccccctccccaacacaagacaagcgatacaacgacgttgagaagcaatccgacctccccaccaagccctccaaacccagcacgcaagtctccctcatagtcggcgcccaaaagggcatgacccgccgcctctacaacctcgccaacgcagccccctccaaaaccctcactctcgccggcttcatcgaaggcccctacggctcaaacccagcaaacttctctagctacggcacagcagtgctcttcagcgccggcgccggaataacccaccacctgctgcagacccgcgcgctcgtcactgccgccgcgcagaacaccgccgcaacccgcaaagtctacctgatctggtcggttcgatcgacagaccacctcacctgggtgagcaactacatggaccagatcctgcgcctgccgaaccgccgcgatattctcgttgtgaagcttttcgtctcgaagccgcgacgcgccgctgatatcgtcagtccgtccgctacggtgcttatgcattctgggaggtgtaggccggatgtggttcttgatgagattttgcccgggcggaccggcgccacgattgttagtgtttgtggaccgggcgcttttgcggatgaggttcgctcggcggcgagggagaggattgggaagggggctgtggttgattttgcggaggaggcttttacgtggtgaggtttgctttgttggtttatatgctttttgttcttttgccttgtcttttttttatccccgtggggtttcttgtaattttttttggtttaatgcactcttttacttcttttgtgctgcggttggcgactcatataacaaacattgcttaatgtctaactgtatactatcactatcataatctccggacttttcctggttacatatgaagatatcttgttgagaacgaggtctactgtgcaagagatagtaattgggaatgtagtagacaatgtaattgaacaagaggctctatgctagtgtatgtattatctcgggcatccctatctgcaagaccaagtgtaatatgtaagaaaaataatgtgcaacaagaagagcggaggattagagatggcggtctaatgcagagtatcttttaggagaaacagtagccatcggaagcccgttaagtgtcaagaagagaagaagagaaaagaaaagaacccaagagatgataaaagatcaagcagtcttagtcttcttgctgcgggttcccttgggcacacgagcaagccagtagataccaacagcagcaaatatgttgaagatgatgtacgcccacatgatgccgaagttgcgccatgcgtcgctgtagtaactcagcacgcccttgaggaaagtatcggtcttgtcgacgctgcagaaactgcaatcgctagtggcattcgcgttctggaggtagccaccagcaacttccatgtaggcgctcatgtattggtaacaggtatcgccggcaaggggctcgaagtggagcatctcgacgggctcgcagacgacgtttgtgccggatgtgccggtcgacagcattgcagagacgaggtaggtgaatggtgagaggcggtacatgaagatccagaagcggggcatttggtccggggtcgcgaggacaccacagaagatcagacagagggagaatagcaagttggcgatattgccacctgtttcggctagctcgataccagcaatcatcatgtgggcgaaggtgcaggtgaagatcatgaaggtcaagacgagaagccacatcagtgcgccgcgctcgtggagatcatcggcgctggtgttgcgttgcagtccaatggggtagtaccagcagacgaagatgaggaccgacatgagggcgttccaggggagttcgacaatgatgtttgcggacataaaggcttgccaggagtatgatttggaggggcgttcacggacttcgtagagggagcgttgggtgacaaagtgcggcatgatctgttgcaccaagttgccgaagactgtcatcaacatgaagacactgaacatttgattctgcagtccttgtatactgttctgggcgtggaagaaggagaagccgacgtagagcgcagtcaaggtacatagcgcaatcttggaatagatgtagactggagttcgccagtactggctgaacacgcggaggagacactgccagagttgaacactgaacggtgcggcgaattcgtggaagctggtaggatcgttgtcggttgtggcaacgggtttcagagagaggctggacttgagctcggcgaggtgattttgcacttccttgcgctcagggctatcgcgccacacggcaggccagtcgatctcactgtgggttccgggggcagctccaatgacctcaagcatccattcggcaggattggcttcaggcgacagcttgggcgcaccgtttcgttcaaagtagttagagagcgtagaagatttttcgccaatttctccgaaatagacagtcctaccgcccctggcgaggaataggagacggtcaaatcgctggaagagcatagcagacggctggtgaatagtgcagagaatagcctgaccgtgcttagtcaaggtatcaatgagatccaagatagaccaagaagtttgactgtcaagaccggaagtaggctcgtccaggaataaaagcagttgtggcctggcagctagctcaacaccaatagtaagacgcttgcgctgctcaacattcaaaccttcaccggggacaccgactacggcatccgcatagtgttccattccaagaagcttgatcacttcctcgacgtagtcgagtttttcttggcgagagacgtgacgcggttgacggagaatagcactgaagcgaagagcttcgcggaccgtggtagtgtggagatggagatcctgctgttggacatagccagtcttacgttggaaggagtggtcgcaaggacggccatcaaccaacatttcaccagaaacaacccccattgtcacgcgcgtagcaagcacatccaagagagtggttttaccggctccagaaacacccatgagagcagtgcaggtaccgggcttaacccagccgtcaacgtggtcgagaatgcgacgttcctctttcttgatgtggatgtcgtaacacacgtcttgccattggaagatagcagtttgtctctggattgcggcagtggtttcttcgccgtagctagcaccatccttcttctcggcaggggacacgctgtgtgtttgctcgacatcatcctcagagctgccgaccttcttgggggcgtagccgcgacggaaaagcagaacctcacccttggacttggactcggaaatgtattcggtgccgatgaggtaggtgcacatgaagaaaatcatgaaaccaatcatgattcccagatttctccacttgtggccgtgagagtactggaagcttgcagtgtagtaggcctcgccgctgatatagtcctggccagccacagctcctttcgctccgcagatcttgttgtaccgaccgacatccgtgtaggattcacccaccgggatgaaagaacccgctttgcatgggaaatcgcgaccgtggaattcgttcacgatcaaggtttcgaaaccataagcaatcgggtcaatgtagttcatccagcgagaccagccaagcatgttgcgggttggtatagtgaagccagtgtagatgaccagaccgagaatcaggatggcggcgggcactagagcctgcgacaaagtacgcgagtaagaagcgatggtacggaagaccatggacatggtcatggtcgtcacgaaagagaagagcagaaaggtgaagaaagcgccgccggtttggcgaagaccagtcatgaaatagagtgtgatgttgaaggtgaaggcattggtgattttgtacggcatatcacacagcattgaagagattgcttcggcaaacggatgatacatggcgtagcgggcttgcttttcgacaataggacgttgcgcgtagagagtgagaatctctagagcactggagaacgagttgagaaggacggcgaagaagagaagggcaccgcgagagtagaaactggtcacgtcgccaggcaactggaagaagaccgaaccaataatcaatgccataatggtgtttccaatcaaggcggatatagtcagactgtagtcacccttcaaacgctggaaaccacgggtcacacagatttggacctgctcggcgactgatagggtgaatggagacttgacacgctgcctcttcgactgcatagccttgcgagactcgacgaatttctcgtaggactcgccgccaatgggatactgctcatcgtactcggcaatctccttcagaagctccttgtacgcagcactgtttttccaagcagtggcgaactcatcgggggtacggggaacgacgttctcaaagccaggtttgacgactcgctcagcggggctcgtaagcgaggtcaggaaatcagcggtagtctggcgctcgggacactcgaagcccatgttggtgaagaattccttggcctcggtggtacggccgaagtagatctgtcggccctcgtatagcacagtcactttgtcgaaaacatcgtaggcactctgggatgcctggtagatagcaacggcacaggtagtgcccgagtacttagacatcaagttcaatgtcttacagaactccagagcattggcactgtccaaaccacgagtactgttatcccagcattggagagggctgccgcagagggtggcctcggcgatactgacacgcttccgctcaccaccggagacaccacgaatgaaatcgttaccgacctgggtgttgatagtgtgcgaaagaccaagcatagccatgacgacatcacgcatatgctctgcgtattgatcgcgagtgacgcccggcaaacggttgcgcggggcgcgagcgagagcagcgaacttcaaggtatttccaaccgaaagctgagggaaatgcacatcggtttcagcggtgtagatggcctcaccgcggaactggctgtgcatctgcttgtcggagattccttggtagttcatatgagagttaccatccttgaagatgccgttcaagtctcctgcaatagtcttcaagaaagtcgaacagccagatccaggacggccgagaacgaccagcatctcgccgctcttaacgagaccatcgaagtcgcggaggatctgaatcttctgcttgccagtgccggtcatcgcacggaacacggcgccgatttgcagaatggagttggccacatccttttggtaatcggtggggctgccaaatccgtgcacactgaggtttctgaaggccaggcccgcctgacgcttcgggtatcgttccgggtcgcgagattggatggcaaggagattcttcatccaattcttggggttgaaattctcactgtgaggattgagggttgagtcctcatggacttcgacgaaagggttctccgcattctgggttgagacagagaagtgtgttgactggcgggtgagttgccgggccaggcgagtgacctcggcctcggtgtagtcctcgttgccaatctcgcccttctcattagcggtgtcatcggtgctcacgctggcggtggggtcatggcggcgagcttccatgttggcggaatgggaatcctctccgtcctgggtgccgggattcaatgtccctaggagcgacatgatgaccttccagcacggtcactgtcgaataggggatggaactgattaagtggggtagtaatccctagaaaagacggataggggagggaaccatcaacgggatgagtatagagagagggtgtacgaatattagttaatagaataacgaaggaaggcaatcagcgaagaatttgaattaagtacggatatgaaaagacacaaaatcccaaggattcaaaagatctagagatcgggactcggaaaagctgtatcctttgcccggaaagaaaataaaaaacggggactcccgtcgaaactgactccggggcggagctggtgactttccggagattccaatcacgaattttggtttcgtatttttctgagactttagctagtccttagtggctgattgccaagaaactgtcgccattttccttgaatttgttgtccacagaggtaaggtagagcatgcgatggatgattctacactgcatgtacctggtacttccgcacgacagccaaacaaagattacctaccaggcataatgatgtacctgccatgttcttcatacatcctacacgtgtccatgccaggtgggaaaacaaggtttccagactcagcagcccgggaccaccgctatccgtcccacacagggctcggatgctcgggtgcgatgcatccgagcggggctgactcagctattcctgggggatccatggatcttagaacgctaaatcgcatgtcacttccacccactggggcaattgttaattccatcttatctccgtcccctaaccccccgtacttggcctcctaaccccgaattacatggatgtatatgtatcttccaaggttgggaaggaatggaccaaatccggctggtttcttctgagtcatgtctccggttatgaaattccttgcaaatctgacgtaccaacatgtggcactgtcagatacgtgctgatgaacccttgcatgggggctgtgatgcggcatgatggttcgttgatccttggacgagcctagccagacgctaggctgcaatgcttacgcttacgccgtgctaaatacggaatatgccttcggttagcagacaatttcaaaatgtgaccagaatgtacagttataagtcggccacgcagggaaagcgaaatattgaatcataatagtctaaattgtacattggatattgttaagaaaacaacagcggtgtgtcagtcttggtcttccaaggaacccaattatggagaccagtcacattcaagacatgtcggtcaccacctcgtcatcatctgcatcgtcttcatcctcgtcgattggttccaccaacagattaccgccacgcccaatcttctctctgatcgaccctccctcatcaacagcatacactactcgaggcatcggtgagaccagtcgaaatccgtagtggtgcacaaacccctccggcgcactcaccacaggacgctctgtatcctgctcctgtaagatctcgtagcactcaaccaccgcgtagatctcttcaatgtctgcatctggcgcaaacttacgcatgatgcgctcgccggacgggagccgcacgctaatacgaacggcatctttgacatccggcccgggctccgcgctaagcgattgcccgcgccaaagcttccactgggcaagatcgcggagccgttgctcttcagccgcctgtcggtcagcggcttcctgttcttcgcgttgacgtgccaactccgcttcccggcgctggcgcgcccgttcacggtcgatcgccagcgaccgctcgtaggctgagtcttgctcttcgcggaggctgcgcgaggcttgttgctccgcgcgtgaagatcggagtcgctccaggggctcgctgttagatgtcacgactgtccggagcttgttcacgacctcggatggcgtcgtgagacctgcgatccgtcctacaacagacatcgcggttgatgaaacatttggtgtatggacgatgaccgctgcaaaggggaatttggtgcatttcaatgagttggcgacttggtatgcttcggaatctcgcacgttgccgccccacaccaggaggttgttctgggggtcattgatgaattctacgacctcaggtgccagcagagtatcccggacccagctgtccgtatcgtcgtgctctggagataagagaatgaccaggaggtacttcaagtcgcgatgggctttctccagcgccatgttgtatccgttctccaggaatggaatcgggatagattcatattcttcttcgaactcgcggataaagcgagcggcagtatctttgggaccgagggatcgacggccagtggtattccggcgagcacgttgcagcgcggggttcgctgtcctgttaaacaagcgtggcaagaaagggaagaggacaccaaataggcggaatgaactgcaaagaattcggtataccaaattaaatggagtgagaagtaggctaagaataaatggaggtcggtaggttggctggtctgccggctgtaagttaactcgtggcgccaaatctgtagctgtggcacgagcaacttgcgacaagtgttcggtcaaatcgtcggtcattaaattctgggttcggcgattgggttgggggggaggggggcgatccaaggcagcgcgggcttcttcaacgggatctgggccttcgccatcaaaaaacttggatatggcaatctatcatgcggggatcagttaaacgctcgtacgcttgactggaagtcggggaagatagaccaacctgcacattccattgtgaccgacgtagtagcggaattgcttcggaaggttcctgactggtgacagccatgtacatttctagcgtagacttctcgctatcagaaagcccgtccaggtcaacctcgggttgtgacatattgttgtagaagggccgtaagccataaactcagggatagaggtggtatcaaaagagagaaaaaggaacagccatgaagcggaagatcatttgaggtcagtcattaagcacgtgcagaatttctcatgcgtaaatggtaagaacgacgtgacgtcgaggctcaagtggcctcaagaagctctcgcattgatgtcctgaccgcctggtccgtgcttatcccccttcgctcgagttcggttctcgccccgcgtcttcgtttccatcagttctgtcgcttttaatcattccttgggaggagagacgacttcggtcttatccttatatcccattcatgcctattgttatcggctgagataccgcccgacgtccgtgggctctcccggaattgacccgccgccaattgcgcggaccgtaggtgacttgctttagaatcgaaacaggggaatgcggttttcacccgatagcattctttgttccctaccgagtccggtttcaatggggatctttttgcgctgatccgcaccaacaaagtgggtatcagctagatatcatggcgtctgccggaaagcctccattggaggatgctcgtcggacgacaggatcaccgaaaatgaagagccgtggtgagtgtgattcgaagtcaaggctggcatttcagttccattttaggactgagatgggcaagctggaggtggatgaattcgagatggaccgagttgctgataacaatgattttgcccgatagagaatgcgaaagacacattgtgccgtaatgtgaccatctatgggcgatgccgctatgaagacaaaggtattgcgaacctgaatcacggccagcgtgggtggtgaagctgatttggaacttttgtatccaggctgtgctttcaatcatgacccgtcgaagctcaatgcaaatcagtcggataggtgcgatgaacacttggtctctatacgacaactggatgtattttgctaacaaggactgtttcgtttgatagcaagaagcggttcaatgtcgactcacctagcttcactccatccttgctgtctgggaatggtgtatcagcaccaaaaaagtccacagctatatctcccaaagctgccagtgcagctccttttcaacctcgaacaacctcatcacgtatgtgctccatgtggagagggagggaggttccaaaagcattcactgacgtcagaaaaaggttcaaacacgagtacaccaacaacacggtcagaagcagtgcaagactgggcggtggccgatgtacaggaatttattccccaggggtttgagcacgtggtcagtcgtccctgcccttatcactcgattcgcatcgatttcctcccctctacctcttgtcttcttacccatccctctttacctgcactagccctattgttatcatcatctctatcatcacgatggtgctaggtggcttgtctgccatggcatctgaattcgatcctgaatcttctgattctccccgatacttcacctctcatccgcctcagcctgaaagccctgggtggttcaacagtattctgagcaatcgtgctaattttcctactcagacgcctcttcagggtaatggaaacggaggcatcacccccacgggtgcatttgatccttttgttactaccccaactgccatgactcccggtgccgttggccctgtttctgccaatccttactcccacgaccatactggcgccatgggaggtgctttctttgcaaaccaaactggattccagcagccggtacgttggtttccattggatcctctttgtttctttgactgatctccaactgcccaacagatccagtaccatctttatgccccaattggccctcacagccagaacacattgggataccagcgcaacgttcatgatctttttattcctaacgacttgcgtgaagaactgcagaagaaatctgcagctactttacaaactctccctagtatgttagacatcacccaataataatttttactcatgctgacgaacttgaagacacccaactccctgcccaggtcgactacttccattccctcgtccctctagatctcagtcatcagaagaatgctgcaatctttggctacccgagctggatctacaaggcccagtctagcaaagatggcatctattatgctcttcgcagacttgagggtatgacaatcttcccgtctcttttgtagctccaaactaaccgtgtaggttatcgcttgaccaatgagagggctatccgttccgtgcaagcctggaagcgtatctgcaacgccagtgttgtgaccattcacgatgcgttcaccagccgcagcttccaagacagttctttgatctttgtgaccgactatcacccactgtccaagacccttgcggaccagcatctcagcgctggaacccgcttcccaggccgtcagaccaatgctcatattcctgagcagattctctggggctacatgacccagatcgccaatggactcaaggcgatccacgccaatggtcttgctgcccgagtgctcgagcctagcaaggtcttgcttactgctaagacccgtgtccgcatcaacgcctgcgctattcttgatgtggtgcaattcgatacccagcggactatggctgacctccagcgacaagatctggtcaacttcggccaaatgatcgtcactcttggcgccaactcacccactgtcatccacaacccaaccaaggccatggagcatttcactcgcgcctacagcccgcagttgaagagctctgtgttctggctgttgaacagtctgcagaaggatcaggagcgaagcatcgacacttttatcactggcatctcatcccagctgatgtcaacttttgattcggcactccacctcgatgatcagctgaactctgatctcggccgtgagttggagaatgcacgacttgtgcgcctgatggccaaactcgggttcgtcaatgaacgccctgagtatgaacttgaccagcgctggtcggagagcggcgaacgctacttcctaaagcttttccgcgattacgtcttccactcggtggatggccaaggtgatccggcggttgatcttggccatgtcttgacttgcttgaacaagctcgatgcgggaactgacgaaaagatccatctagtcagtcgcgacgagcagagttccttcattgtcagctacaaggaggttaagaaggctcttgagtcttccttccaggctctgatgaagcctgctagacgcatgcactagcaagttttcgaaagttctcacatggtactcgtaaagatatcgcagcttgctatgtttgtctcatagtttaacccaagggttacatcttttgctttaatttgcaagcaccgatatcgccaccgtgattgaaatacaaacataggaataaagaaattcaaattgctttccttggtcgtaagcctgtagacatctctcacaattctcctcgagtcatcccgtagacgcaaccatccaatctccctacaagctcctcaatgatcagttccccatcttcatcttcattttgatcctgaatcttcctggggggaatcaatacccgatccaaaacatgcaccacgccatccctcgccaacaaatccattcgtccaactctaccaaacccattaacccgcatatcaacctcaccaaaccccttcttaacatcaaccctcaactccctcttcaacaaagtcacaagccgcacattcgcatagtcctcctctagtccatccccacgtccacccttcccctcgccctcatgcgcatgcccaccatgacgacctgaaaacaacccatgagacgttccaagactactatacaagacatccgagtaaaacgtctgatttagcacaatatgatactgcatcaacgtacgcaggcacccctcaccccgccgcgagaaaagaaaccgattagccttctctccgagccgtctgaaagcgacgttcgtgggcacgaaggttgtgccgccctgtcgctgcgccgggtcaagattgtgggcgagtttcgtgcgagctagcgcactgaagtcggttggtgcttggtgcagtatcgtgcgtgtctctgggggtgggtggaggggactggttattatgtggattattccgtttttggatttcttaggtgaggttagtatctgtcgatgtgtgccataaattgatgctttactcaccatgtcagctgccacaaccctactcctccggttcaacatcactccgttctggtgctctcggacaacgatcctctgtggtagagtcgattccagagctggctctgtcagcttcgtcggtagcgtcccgtggccagcaatatgctcgattgaaaattgaccgggcaggatatgataccgcagcaacttggacatgagcttcggactggggccatttcttccccgtggaagtctctctagggcacggttcgtcagcgcgaagaaggtgtggtttgccgtcgtgccattgaggatatcaatcaggtctttgtcgtcggcgatgagctcggcgagtcgggatgtatgctcgctttctctgatgagctcccatgtcgtcttgtccgcgtggcagaacgggcctggacaagcatcgattggccggtgtggacggtgtcggtatctgtcccatggtcttccgtcgcggtcgtgtctgtcttcgcaatcacctcggtatccaggccattctccgtgttcgggccatcccccatgtctgggccgatcaccaccgggccatcgcccgtagccaagccaatcgccatgctccggatattcatcatcatcgcgccagtcaccgtctcttccccagcctctatgttcatccggggagatgcccagcaggctcatctcggcatctgcttgagatggatcattcgtggctggtcgagtctcagagactatctccgcgaggatactctcatctaggatgacaaaggccgaggccaatgaagctgccacagataagaaaaggtaagtggaacgcataatgccgttatcgacaggaaatcggagtccaatgcagatgctcgatcacacaatggtgatgtacctatataggaaggcctccctcgtcgaacccctcgactttcttgatcttcggttgtacgagtcgtacaaagctatcacactacatcagatagcatagatgaaactgttaaatcctcgctgatccggtcgtcgtaccgtggagactcgagaaacaacttggatcaacaagagcaccagccatcgctgagaatatgttacatattccaatcgagaccagaagcagcggaatacgaataggatacagatattcggactatatttggcagtctcagttccgggctaacttgagatcttgcattcacgtgcaattctaatcttcttcttactagaacgaaaaccaggcagtatcggaagaatcggttatacacgtcaagatgtatttctcacttatacctgtttttccatatagcatttaatccagatccggcacaggcagcccattgacaatcttgactttccgtcctagcttgtccagcgcgaccttggagttatgcgcacgcaactctttcgtctcttcgtcggagacaagcacaaagtcatatgtaaggagagcatggccctcggggacattatatttcctagcgatctccgcgtccgccttaccaatttctacagtcaaggaatccttaacgccgaagaccgcatcagatgtttcataagggtcatttcggagatagagagcactagaacgcagattagcataccatagcccacacaagtcaaaaagggcaacagcccaacatacgtaaccaaatggtcaaacccctccttctcaaacataaagtgcatatgcgaaggccgatacggatgccgccgcaacatctccagcaacctcccaacaggcccatcatgcggaatcggatacggcaccggcgtaatcgccataaaccaaaacaccccgtcttgatccgagcgcataacacacctcccatccggccccaccctcccagcatactggacatcataatggcccgtcgaatccgtctcccagatatcgaccttgacgtcgtgcaccggcgccccctgcaaatcccgcagcgagcaaacaaccagcaacggctcgccgtgcggatcatgcgacatggacgcgccggcgggcatttcctcggcgtcgtgcgtgtggaacgggcccagcacggttccctctgtggagcccttcggcttggggtggtcgattgagtcgacgaggatcgagaggcctaggacgtcggacagcaggatgtattcttgtcgtacgtctgtacaggcttggccgacttctgttaggaagttgaggccggtcatccattcggcgctgctgagacgggtttcgcgcgcgaagtcgtggaggtgcgttactaggcgttcgaggatgtattttaggcgtgggtctgggcagaggctgttgatggtgattacgttcgcggtgatgttgtccacggtttggtctttcattggggggatcttgattttggaggggtccatggtggggttttgtagatgttgctttgaagtgtagaggggaatggtagatggtgaatggtttaagctggaaaatccggggttaagctgtttatatggtatagaaggtggggtgtggttgtttactttccccaggagatacaagttctctcaatcaatcagacgctctcgaatgataaccttcagattgtttcaccccgcaatccccgctgatccccccgtcggatgtcagatcggatttatatgccgtagctcttgtatacgacggggaaacctatccgacgggagtctttagggcagagtatatatccggccccacagatatctgaatccattctagtgtatgacacagaccaacgtagatcagaggccacgggcgtcgggcattgaagaagtagataatattttacatagtcattctaaaggagataaagtagatatgttcaatgagagaagaaaagaaaaaagaaagaaagaataacgctaaacagagggatatctaacatagtactcccacacccaacccattgccaatatgtaaaaacaaaagaaaaaagtacaaatcaatacacagaaaagtcgatattttacgcatgcaccatacgccgatcacgatcacggtcacggtcacggtcacgatcagcctcacgttcccgttcccgttcccggtcataagaaccagcattagaagccggagccgggcctgaagcaggaataacaccggcagcagcactcatacctgtgtgttctccacgctcggcaccaagctccctcttctgcacagcggcagcgacgcgtgtgtgatgatcaacagtatccataatagcctgtctaagacgttgattggcatcgggatcttcgtcctcggagcgatccgagacacgaccagcagggacatgagggcggtccctcttttctgtctcgctcactgcccgtcgcggggaattatcacctgaaggaagctccatcgggaccgcagagccaggagccaggttcggggccgaaggggccgactcacggcggtgttggtagtaggcgttgacctctggctcgaagggcggttctcggggatgctcgcgctcggcggagatcgggggtagtggacccataaaccggggtggggtgacgtttgagctggagcgatccttatcgggacgctcgttggataccgttgaggtggtgatgcccgcacgcaatgctgccacttcgtcttctttgacgtcgcgccaggagcacttggcatgtttcttcgtgcagccaacgcaggctgtgaggttcttgagacagtccatgtggaggcggcggcagcggtcacacggtgggatgacgcgctcgccgcgctggagctcttccatgcgagctatcatttctagcttgaaagggcccccgtcgtctttttcttggtggattgattttggcggtgggaggagggatgatggggtgcttgggatggcgactggggttgccgtcgccgggttgtaaagactgtagtctgctggatcggaggcacggggccgtgggagtggctgagggttggctgctggggctgctgcatcttcatagccgcgagcgtggcggtcagccgttgtgaaaaacctcttcatcagatctgcacgggtggttggggaggcacctttgatcgattgtccgttgatcatggtgacattatcggtggattgtgagaacatgaattgagatgattgggatgtcacagggttctcctcggtgtgctcgggttcagggcgatgggcgttgacagcgacgaaaccagacggagaggggtgagatgatgatacatggccgttacctgagccatgaccgttggcatcgcgccacacttcggggacatttcgggattgcgtgtgtagagaagcatcgttctctcgtcgagtgacaatagcattgcgacgattcttcaaacgatggttaagctgtcgcgctcgagcagagacttgaacacaaagattgtcagtcaactcctaaactgatatacatagtgattccttaccttgatcagccatctggatgatatggtacaagttcttttcaagaatctcaagcgcgcctagctccttttcctcatcctcgatgataggctgaggtgggatcatcttctgtggcatgcccgaggcaatcaaaacgaagtcctcctcgctgatttccacgcgacactgcttggtatagaactggcagactcgcacgccattgcgcgacttctccagattgaattgctcgggcttattctttgcgaattcgaccacatcgagccaggtcacggtgggtccgtctttaccatgggatttcaacacctgcggcggtccatcgaacagacgctcgaagcgcttgatcaagatcggaccgagcgggcatgcgcccagatttccggcaatgctctcgtgacggtgtagaacgccgtcgtattcgccgagtagatggatgatcgcgggcatggtatcgtcgatggagacgagtgggaggttgtcagggtattgccgtgccagataatttatctgcaggtggttcgagtgcgtcttgggcattttcgatgccatgccatgatcgttggtgggagaccgaggccgcttatgagaagacgactccgttgttggggtgtgagattccattgtgggagttaggagacccctatgtgcaccctggagtggtgtaggatggtggaaagagaggaagagaataagattgggaggaaagagaggagaaatcgcggagagtgttcagataagagcgcgaagtatgaaactcgcgcggagatgaagcggacttgcgcggagggaaccggcaggtgactcctttttagaagacttaagctacatccatgaaggtggaggaatgagaagagaagtgtacgccttcagagggacggaacagcgcacggggagtggagaggaaaaacgtgatctggatttccggttggagtcccggggcttgaagagtcggttttatttattttatttttttggtttatcgtttgatcattttcctgtgattgacgaatcgtgttacgcagcaattccgaactcgcacaatgtgaggatctgccaccaaagtacctggtcttaagttgtagggagtcctcagcggagtcccgccggagggttccgctgacctgcgatacgctgcttcaactacacagttacaccttgcctatagtctcacatattttgtatgcagaatggcttctacatggcagtcgatcattctatacatgacgactgttatctctcgaaaaataagcctttcagccttgtggagtgttggtttcgctgatgcctgaacgggccagcgggctgaaacattttggtcccggggagctcggagggaatcacaagataatcatctggcctgggattcgatttggaaaaggaactcgaattggtacatcatattctgaatatccatagatatacatacacatgcaagtacgtggaattcaaggaatgtatggtcttcaacggtgaaatgtccagacagctgataagatacatgtaatctcgctgttaaatacctccgagcgggattcctcacagccgtcaagcgcaaaaatacagcggtaatcagtaattcccataccaaggcggactccttcctgcctgaggccgccgtccctaaaaatccctcatagacgcgcccaccttgcttgtaccttccgctctcccccagacaacagagaagataccgagatacccgtctgtgtccatcggatccaagcttttattccctcacctattatcttccttgctttttctaaatccctcaatttcacacgccatgtctgaacgaggctcgttccgaggcggtcgcggtcgtggaggccgtggcggccagggccagcagaaaagtggcggtggtggcggtgcacaggagaagcccaaaaaggaaaacatcttggatctcggcaagtacatggacaaggaggttcaggtgaagttcaatggtggtcgtgaaggtatgttggattatctcttctaatatttgcttattatctttctttttcttctgcttttggtcttgacttctcatcgcatccatctatgaaccatatatgctaactccaataacagtcaccggtactctcaagggttacgaccagttgatgaacctggtcctcgatgacgtaaaggagaccatgcgtggtgagttccaacttccttacttgaatctaatctattatctctgcttatactaacccccacagacgaggagggtaacactaccacccgctcaatgggtctgatcgtcgcccgtggcacgttgatcgtactgatctcccccgccgacggaagcgaggagatccccaaccctttcctgcaatcagaagagtaaaaaaaaaaaaaaactctctttcacgtattatcttctttccgggtttcattctttccggatcgggacgtcatttcaggaaatggacatcctgcatctagttggagtttcaaaacattacacaccttaatgtcccaatggctttcggcgtgcgccggaacatacgctcatcagtagctacgaagggaacgaacgcaatatgatggtttcgctttttttcttttctgtcgacttggaatgtgcatgataggactgctactgtggtgcagttctgtctttcgtctctattttcttctcaagaggaagtgatgaatttgggatcggctcatgatacatagcaccacaaccaaactaggatataaccgaaaaaaatcaatatagtcaacacgagagctatccaagcgaactgaactccgtaggtatcatgtattaaaagctaacataatatattcacatactatcctgtacactcccccgatcgccgatctactggcccacttccccagatgtaggacccaccgtctctccaaactcagcggagtcatcggaagcatcactatggtcatcgggcaaagaaacccgccgcggctctgcatccttcaaccttcttacaccctctgcctcctcgacccagggcccgaccttctccgtgccgtcgatatactcggcagcaatgcgcagattcagacccgcgctaagggcacgctcgatgcgggtctcgcgattctgagacacaagcgtgcggaaaacgtgcacgaagaagccgccgagaatatcaacgctccagtcctccggaacaagctcaagcacttcacggacatcgaaccacgccgcgaagcgcgcgaggagatcgcttgtgcgctcgatacggtcggacacgtcctcaatgtggagaaactcgtcgagcaggtggcggaagagcgttgtctgtaaggtgtagtctgctagttctggtaggatgcctgttgaagaggaagagctgcgcggaccgccgaagacacagtagcggattgcggagtcgtagtcgcctagcccgtgtgtgaggagatggagggccgggctgtggtggccttgtaggccgtcgaggataatgcattccgagactagctcgttctggaatggctcgatgcgggtgaggacgttggggattgagtagctgattcctgttgggaggggttgcgaggtaaatcgagagccggagattccacccagcagctgaagtaaccggagtcgggactgccaccagggctctgtgggggtgttctcgattatgaagtttaagtatgtcggtttgggagcacgcagggctcgataggtggagtaggattcggccaaagaagcccgtgcttcgggggatgactcaagcacggagagtaccgtgtctaagtagtatgagatcaggtcgtcggcatattgcgtgtactatatcccggtcagtgagatgtgcatggactaggcaacatgacgtcttacattctttgcaaataccaggtgctctaggtagacctggaccgcgtttggagctcgctccttgagtaaagcaacaacatccgccggttcgagtctaacacggctggcgttgtctgcgaatatctggatgcccagattggggtttcgcccagccagccaagagccatactcttcaaccagctgcacgtcctttatcttgaccaagtacctgcgcatctgcgtctccacaccatccgcggagacctctccgccagcgtcagtctccccatcaacgattcgctgccaggttttgagcacgtttcgagccatctttcggctttgatacaaacggcttagcacatagagccgcttgtatgtttccaggagcatcactgctcggtcgaaattgcctttccaattgtcgaccagcttattcagctcagcgcgaattggcgacgctgcccgctgatctcgcgtcaggtaggcgtcttgttccaaggtcaggtgcaagagcgcagcatctgtgctatctaaaacatatgtctcatcggtgatactaccatatccccgcttctgctgccaggagagaaggaatcgtttcaccatattgagaacaggactgcgagaagcatccaatccagaggattcgatgcctatcttcccgacttgttcaagatattgttccgccatgcttgccagcccagcgtgtatccatataccctggggcccctgcaaaacctcgcatcgcaacagaggaataaatagcaatgccaaacgcggatcgaggttacctgccagcagcgctttctcggtgccatcgattgccgtggcatcacggtcgtctggctgcatggagaggaggtctccataaagcataaggctggccttttgtttcacatagctcaatccaataaattcggcctcggtctttggctcggtgttctggacggagagtagcagatccagaatggcatcccgacgcagcaccgtgtgctcgttctcttccgtttcctgggccctctgcagggtgtcctccagctggactatcaatggattatgcagtacgcgccatatttgagatccagaccacatgacaagactgctctggaccttgcctagtccacgtgcaaattttgcttcttcggcattgcgttgagcctcccagccttgggttgctgagccgtcgctcttcttgattccctccgagtcggccaattcttgcgaatcgaacagctctttctctttttgggagtgctcgatagatgcctcagttctcgaatctgctaccgacacatgcggtggcagcgtcgggtttttgaggcggaccatccgcaagagctgcccgatttcgttgagctcaagatggctagggctgagggtatgtcgaaggccgacttgggattgtgtctctccgggagaaggtatctctaaccagctcttggtccgctcaatctcccctgggtcgtcgtcccaacgttggatttcgagtcttgttcggaacttcccaccatcttcgtcttcgataacagcgagaacaaactcctctttggcatcttcactagtctgaaacatctcatcattttcgtttgtgtcaatcacaaccgactttggaaatctgtggaagttaattgtgccccggacaacttcaccgtccatgtcgacaaacatgccaacgcccggttctgtctcctcggttccggtcacaagtagaaactcagaaggtgtcggagataccacgtgaggctggagacgctttccttgttttgttggcggaggtagaggtggtaagggcttcaagctgtcgttggtgggagacttattgtctgactctgggtcactagggggcttaggggagctctttccatctcgctcctcagagcttgatcttctgggttccccggtagatgtgaaaggatccggtgtccctgatggtgatctatctagctgggccgcttgtgcctgcggtgagagcatgcccacaaaggtattcatactattgcttctgccatgccccgaggcatcacttggtggagaagcagggtaggatgaagaaggtgaacgtttcagcggagtgcgcggcgctgggttcatgtcttccacatgccctgactcaaaaacctcattcgaggaggatattgggaagagcgggatcttctgttgatgcgccacttcgagtaatgagtatgaatgtgtatccgcagcacatgcgatcgttcctcgtcgcgctgcagtcaagcaaccaggaaactcgatcttcttgatccgtcgcgcctcatccccaatctgaaccagcatgattctgttctgcacagcaatcatgatagtcggattttcgccttcctctgcatcccagttgagatccaacccaccgatccagcggcagtgattgacctttgtggctccaaaggccgggctgagctccggcagcatgtagaacgtaacggtgccattgcagagaacacatgccttgtttactgaggacaagagaacgatttgtcgaacaccttcctgatcagtacccgctgggggactctgggcgaataggatcggtaatcgggatgccaatataaaggtaggttcggcggtttcgtctggggatgagggcgggagacatacgaagtgcaagatctcggctgcagatgtgccaatgtataggttttcatctgtacaagattagtcagctctggggccatccatggatggagcaggcaccgaaacagatagagcttactccagtattcaacacaggtgatgtagacgttgtcgctatgctcagtcgctaacggcacatccccgaagagggaatgtaacaaatacggcacagccactggtggactggtcttgcgccttttgcgtggaccaattccatcgtctgaacccatcatgagactgtagttctgagcatctccccgcaagcttggatcgtgacaatgggagggcggtcagtagctggggccaaagctcaggggcaactaatcgtatttgtcaggcagaagataaagcgatcgacgcgtgtgaagatgcaatcctagctttgtacacattagtattgaagctgattctctaggacctaaaagcttattcttaggctttagtttggtgctctctgtcttactaattttatttacaatctgaagctttaaatgcgatgctcaagtaggacataaaggcggtcatttaggcggtcaccaatctataagcggtcgttgtctcctgccatacattatactgttggaaacgggtgcctcgggttaactgcggtcgccttgaaacaatacactcattatatagtctccatgcttgaggtccctgggtgtcctctcaccttttgtatcacctttgtcataaatctgtattcaacaacgccaaccacagatcgtacgttgtacatacaaccggaacaatatcggcccgttcgccgcgtgtcctgttcctcgcgataacatatctccatctctccccttggtggactgccatttgatgtggggtgacagtgcagacccctggggttaggactgacaatggattcattcgccatcacagagagtttggtccctcaggaccaacatgacacccaacctgaatcacccatgtccagcaaattaaccgaagagaccaacaagttccaacgcgccatttcagcctggagaggtaattatcttcttatatgttgctgagtctttactgacatatctagggattgatttggccaacactattgcgaaactcgataccaccgctgcggacctcgttgaacaacagcgcgatgcactcgtgcaaagaaaggacctggcacagaagacgaaagcctacaagaagctagacgatgaatctaagctctcggaatataaaacactactgaagtcctatcagtcctttatcgatctcttgaccaaccaaggcaagacgtcatcgtcctcattcttacaactatactcttccttatccgaagctccggacccctacccactcctagaagcttctgtcgactcccttgtcctgtccgaagatacagttcccaaactgacctcagaacgggaccaattgcagaagtcggtggatcgtctcaccagacaacaagaggagaccgagaaacgcctacaggaggaacgtgctgcgcggaagaaactagaggaaaaccaggaatcaagagctcaggaaatcgaagcatcgtgggaagctgttttgacagaaaagacaaataactgggcggcaaaggagaagactttagaagagaaagtggaaaaccaggatcgattgatcaaggagctcaaagcaagctatgaggtttcccagcgcctaggtgagggtgggaatcaaggtgatgatagtgagggttcgcggagtggcgctactgcagctgagctcgagctggtttctgccgatttagagaaaacgagcttgagattggctgacgtggaagcacgcaatgaacaaatgcggttggagctggctcacgctgtatcacatgcatctggtccgatttctgttgaggacgaccccgattatctacgactccagtcagagaactcttcattgcttcgcaaactagatgctgcacgatttgacaaagactcagaacgacacacctgggaagctaaactgcttcaatcggagcgggcagcttctaaggcagcagtggaaagggaagagttgcgtgtgcggttagcaaaggtagccgactacgatgagatccggcgtgagctagagatgatcagatcgattgagttcgcagctggcgatgatgatgagccgggagacggtgctggtggtggttctgcggttgacgccaatggtgagggggccaaatccaaagacaagaattctctggagcaactccttatggcccggaacaagaaattgacggatgatctcaccgtcctgcgaatgtcgcaccgcgatatccacgggcagctcgaaacactacggaccgagctttcgacttcgaaggcagagctggagaagtcacgcaccctggcaactactcttgagaatgaccttcttcgtgtgcaagatgaggctgcaaatgctttcccatcctcggcgatgtctgttgcaggaacttatacctcaagatatccatcttctgcccgtcggggcgcgtcatcgcccacctcatccatcatctctggctttgaccagagtgcagtgtctgcaaacaccatggaatctatccgtgcaggagaagccgttggtggcggctctggcctcctacccatgatccaggcccaacgcgaccgcttcaagaagaagaatgctgagctcgaagaagagctatcaaagctatatgccactgtcaagtccctccgacaggaagttgcatcactccaaaaggacaacctgagtctctacgaaaagactcgctatgtctcgacctacagtcgtggccagggtgcctccacatctgcatcgtcgtttgcaaatactcccagctcaacttctatctatacctctgcagatacgccttcgggtctgtcccttgaccgataccaaaacgcctacgaggctcgaatctcaccgtttgctgcgttccggggccgtgaatccacgcgcgcatacaaacgcatgagcctaccagagcgtatcgtcttctctcttactcgagtcattcttgccaatcggacaagtcggaacttgttcgctggttactgctttgcactccatcttctactttttactgtgctctatatgatgagcacgacggatatcgagaaacatagcgctatgggcgccgccggtagcgccgctgctgctgcatacggtagtagcagcgggggtggagtgggcacgggtaatggcgggagtcagctgaaaggtgatgactggcagcaggaaggtttcaactaatattccaaggtttttttctggtgtttacacagcgaagagctccggagttccttttttacttttctatttttactctttctcttcatgacgatcatacgtcctggtgtctgggattaagtgtttctctgcgctgtactattctgggatgtgggtcgagagcggcatcgtgtgtaaatttgatttctggcaaatatcatgtgtctgagaccaatatagatggccgtagatttcgaatgtttccaaggggtgtgatgagcttaggtgtgtttaggtgtgtccgaagtagatccaagccctaatcacatcccttttgaggctatgtaaggagacttgtttggccctacttggcctctcgggtcggattggaattttcctaaaccccctcatatctatgtactctttctccttggagactcggtagtgttgttcacgcaatactacgggtgcatgtaggctttgtagctgacatacgatgtttggacggcattatgcttgagatatcaaaacattcttaagccctcgtcaatcccaattctgggtaatcatgcatgtcagttaggtacaaagatacctgtcagttcggacttcactcccgacgtcaatgtgatgcattagtgtcggagaattatggcctagcagatatatatatctcaccggtggcttgcccaagtcaaataaacacaggcaaaaatgccgacaggtaataaaagcaagtgtcatcggtcacataaatagatgcaagctgcgatcattacaaagggtctgagcaacttcatgtaagatggcgttatttagccgccggtgcgctgtaacttggaaagggaaaaaacaagacgggagaacggaagccaaccccgccatgtcagccaccacaatccagcattggaagacggattgtgaacaaattggctcgaaattaggactatagcatggttgaaaacatgaaaaagctctatttgataagtgccagggacccatgtagctaatgcctgcaatattttccccgagttctgcacaaatcgtaggattatggcctagcatcgatgcctctgcacactagcctatactggcaatgatctcgcacatctaacccaacacacatggcactgttcttcagtcagacttattaatagccccggggaatttatagcgctcaccacattggctcggttcgagctcctacaatcgaaccgccaagggaaaccccgttgttttgcttagcgcattgctatcatgatttagtcaaagtcgcttgcagtcgacgacaaatcagaagccaaagaggctgggagggtcagcactgggcgcatccatctaccaatgagaggccgtggtcgagctttaatccctgctagtacctgcaggttgcatcgatcactctgttaatagcacacagcattgtttcgagtcggacctgtgttactatctttgttatatgcttgaattgaaggatagttgcaattaccaccgcgtctatatgtatagctgcccctcggcccggccaatttatcatgtcaacccttcccttgtcatttcttctccaacacgcttacctcccttccttcatacttcatacccgacttgtatcaaaggcttgctgggcaatctttgattaatctcaaaaaagtcatcgccattgaccgtatatttatctgcctagcctgaacacataacagcaatgcgctttgcttccctcatcatctgcctggcagcagtttcgcttgctgccccaacaagcttccttgacgatgcatacaactggactgaggaaatggcagaattctacggaaaagtgagccagtacatcaacaccgcaaaacataacatcagagcaccgggggcttgcgatgtctctaagattgccctgccttcctatgcttcgggaatggccagcccgtcagggctaaagccaagatacgttgcactcggtcgaggcacgcaggtatgacaagctcctgagatactttattgagttacatcgctcattatagaactagaactacacatgtgcggactctacttccaactccacacccgcggctgtaggagctgtcgcaagactgtacaatgccacatgtattgcagccaactaccccgatctcctggcaaagctccccaaccttgcctacacggtttccctaccgaccaacgaagatgcctcgttccctcccgccaacctcgacttgatgggtcaccacttcttcactgatgtaacccccgagttcaacttgaacaccactcccaaaaagcagaatgggattgtcatggcaaagaagggaggtgcattagatgcaccctcaggttcagtgtcagggcagtacggtgctgtgccttggctctatctcacttctaccgatggcacggtgggcaactacaagagtgtctatcgagtcaacactgccgctggatcgtcaccaacgacctgcaagggtatgccactcgcattccaaatgcaatatgctgcggtctactacttttttggagagtaattgattgttttttgttatgtttgtatatacagaaggggactttggtcggaggattcgatttttctatatgtgaggcgggcgctatcttactttgctactattatttagttcatgaccgattatgagctggtgccaaggaattaattgttattcttcatcgatcgtactccgtagtgttccatctcacccactgcagggttaattcgacaggagcacattgcagacagaacttatattttggttggtccaatcacttcgttcaaacctacatgcttgaaataccaccactgaataatcagcgataactttgtctattttcaatcgcagctttgcatttcagacaatacagggcttaacggatcacgtgacatacacatggaggaatgctctcacgtgacgctctcacacggaggacacgctaaactggaaacaacctagcgccgttctgattttctgaaagatcccaaaggcgcaaaaaaaaatctcgaccgcatcaacgagcagcatcggtatcgatccgtatccgacagatagtcagcggccaattctgtttgaattgcttgatccaactatctctgatacgttgccaatttttttctccctctttatcgactctcggaacttttattccaattttcaactacactcggttcaagcactcggaaacgacagcttaacctccctctcctctgacttcttttataaccgagtcttttctcaacacacataaaatgtcttctttcgctcctcgtggacgtggtggatttggtggtgatcgcggcggtggccgtggtggtcgaggtttgttcagtccgatccatttgagcagcaagcattcaggtccaaaatctcgctggtgattctaccgcaccgatggccatggtcctgtttcttgttgcgatactatagttcacattgctgacttgttgaaggtggcttcggcgaccgtggtggccgtggaggtggccgtggtggcttcggtgatcgtggcggccgtggaggtggccgtggtggattcggtgaccgtggcggccgtggaggtggtcgcggtgcccctcgtggtggccgtggtgctcctcgtggtggccgtggtgctccccgcggtggtggtggtgctcgtggtggtgccaaggttgtcattgtaagtgttggaaattctcatggacatgggtatcagtcactaacgtaatcttttctcttgcgaataggagcctcaccgtcacgccggtatcttcgtcgctcgcggtggtaaggaagacatgcttgtgacgaaaaaccttacgcctggaactgctgtctacggcgagaagcgcatttccgtcgagggccccgcaactgaggatggtactgtcactaagaacgagtaccgtgtctggaaccccttccgttctaaggtaaatactcctccttatcctgggctaaagatgcatggtatccttggcgatttcatcgaatttttctcggaattcttcaatatcgccccgatagccatggctgccttattgtttagtccttcttttctaacgtcttctcccttttctagttggctgctggtgtgttgggtggtcttgatgatatctacatgaagcccggctccaaggttctttacatcggtgctgcctccggtacctccgtttctcacgtcgctgatattgtcggccccactggtaacgtctacgccgtcgagttctcccaccgctctggccgtgatctgatcggcatggccactcaccgtaccaacgtcatccccattgttgaggatgcccgtcaccctctccgttaccgtatgctcgtccccatggtcgatgtcatctttgccgatgttgcccagcccgatcaggcccgtattgtcggattgaacgcccacatgttcctcaaggatggaggtggtgtcattgtctccgtcaaggccaactgtattgacagcacagccaagcccgaggttgtgttcgctaaggaggtccagaagatgcgcgaggagaagattaagcccaaggagcagctgaccctcgagcctttcgagcgtgaccactgtatcgtcgctggtatctacaagcgtaccgcataaaggtcttaatctctggtctctggttatgtccattcccttttgatgttccctcggcgtctcgtgttctgtgatgtatcgaatgttttccacctttcttgtgacaggtatttccgcctatgtacttttggctgcgtcttaaaatttagttttccttttcgatgaattttacacgctggaatgtgtcatactgagtgtcttgatctgaggtgatgagatggttagcgtatgatatccgtacctaggtagctgcaagtggccaatacaagcgatttgagtcttgctaacatttcgccggcaacattggagcattcttgtagatatagctgccagttgttctacaagtgtctgtcgaccgatatagagcgtatctggcaaagactcagagcaattccaacaaagaagcagcacttcggtaattgctactagcatcgtctaggaatgaaaaaggtaggtcatcttcccaatggtgcattctcggacttgccccgggcctcccggtaatcggattgatgaccgaggcttgcaccgagaaaatgactcggaattgatgcgcgagaacttggactaatcgatcatattggggggatatgataatacgattggctgatggggaattactatgaccgaacgagcgtgggggagagacaagttccgcttcaaccccgcaaggtgtgttactatataatggcaacgcatgtaatttccgttctacatagttgaatatactgctattcattgcactgccctcttgctaatagccagacttaccggcatcgattgacccaattacccaaactaccttgtcttatacatatccatgatgtcgattctcatcaccggtgcggggggctatgtcggccaggaactagcggcttccctgcttgcaagcacaccagccacgacaaccgtgacaatcaccgatatcgttgagcccgagatcccagagtcggctgcacagtatgcaaaccgcctcaggtgcgtcaaggcggatctcacctccaccaaagaggtcgacgagctgatcagcgcatccaacccctacgagacagtctatatcctccatggtatcatgtctggcggctccgaggccaatttcgagctgggcatccgtgtcaacctcgacgcaacacggtacattctggaccggctacgcaagaccgtgcccggaacgaaggtggtcttcacttcatcactggcagtctacggccttgcaccaccaggattcgtcattgatgagacaaatttccctcctgtgccatcctcctcatatggatcgcagaaactcattattgagacactgctgaacgactactcgcgacgcggattcctggatggccggtgcgtgcgtctgcccacggtgaccgtgagagctggcaagcccactcaggctgccagtagcttcgccagtgatatcatccgcgagcccttccacggtaataaggctattttgccggtggccaaggagacggagatgtggatttgctcgccgcacactgtaatcaagaacttgattcatgcccgtgaggtacccaaggaggcatttggagattcaagagctgttaatcttcctgggctgaaggttagtatgcagcagatgttggatgccttgttggaagttggtggcaaggagcgtcgggatctcgtggaggagaagtatgacgctgccaccgacaagcttgtgcaaacatggactccacgatttgatactgctcgtgctttcgagttgggttttgcagcggatatttcgatggaggagaacatcagacagtttgcgagccggtttgtatgagctggaggcatgtagccaatcaatagacgcgaaattggatgaccgaaattgaaagatcggaaaaccaggcatatccggatacgttaggatcaggcaagccccatttgaacattataaagaacaaaaaagacaatatacaggccaatttagaccgtattctagcccacattatgaattaatgcagtgtaaggaagtattcgggatgtcaagggcggtttggaaaagcgggttatgtaattggctgagctgggcgaacaatttcagacttcggaacctcaacctcagggcgtctccatcagctcttttctccatctcttctcccttccccctccctccacccatacaagtcgctcccaatggcttctcggcgccttgctttcaacctaaaccaggctctccgcactcgtgcggccctgaagtccatccagcccgtgaagcgtggctttgcgtccccggttgcgttgccgtccaccacccagtccaccaccctctccaacggattcacggtacgaacatgcaattcatctcaatgatatcgcaatttagctaataatcttctagatcgccactgatcactcgccatgggcccaaacctcgacggtcggcgtgtggatcgatgccggtagccgggcagagactgacaagaccaacggaaccgcacacttccttgagcaccttgccttcaaggtccgaccctacaaaccccaaactacgaagcgcttttatctgataatatgactagggcaccaacaagcgctcccagcaccaattggagcttgagattgagaacatgggtgctcacctcaacgcctacacttcggtacgagccgggaaaccacccaccaacgtctaccgtacctaatactgatcgcgaatactatagagggaaaacactgtctactacgccaaggcctttaacaacgatgtccccaaggccgtcgacatcctcgccgatattcttcagaactccaagctcgaggctagtgccattgagcgtgagcgtgatgtgatcctgcgcgagcaggaggaggtcgacaaacagctcgaggaggttgtcttcgaccaccttcacgccactgcttaccaggcccagcccctcggccgcaccatcctcggccccaaggagaacatccagaccatcacccgggacaacctgaccgactacatcaagaccaactacactgctgaccgcatggtcctggtcggtgctggtggtatcccccacgagcagctcgtgagactcgctgaggaacacttcggtggcctccccagcaagccccctacctccgctgccctggccctcactgccgagcagaagcgcattcccgagttcatcggttccgaggtccgtctccgtgacgacaccatcccctccgcccacatcgctctcgccgtcgagggtgttagctggaaggatgatgactacttcaccgctctggtcacccaggccatcgtcggtaactgggaccgtgccatgggccagtcgcccttcctcggcagcaagctcagctcccacgtcagccaccacaacctggctaacagcttcatgagcttctccaccagctacagcgacaccgggtaagttttgtttcctgttgatcatctatgtatattcttgatcaaaaacatgctgacttagtattagtctctggggtatctaccttgtcagcgagaacctcactcagctcgatgacctgatccacttcactctccgcgagtggtctcgtctgtgcaacaacgtcagctccgctgaggttgagcgtgccaaggcccagcttaaggcttccatcctcctgtctctcgatggcactaccgccgtcgctgaggatatcggccgccagattatcaccactggccgccgtctgagcgccgaggacattgagcgtactgtcagccagatcaccgagaaggacgtcatggacttcgctacccgtaagttgtgggatcaggatctcgccatgagcgctgtcggcagcatcgagggtatcctcgactaccagcgtatccgcgcagacatgtcccgcatgatctcgtaaagttgttctagagtatgatcgcgtgtgaagatagctgctgaatactccaggaaaactgggtttttggcggctttgatttgaatgtactatcaatcattgccttgggctgttagatcccaaattcgtgtgtgaaatagcaattaatggtttgccatagtagactatatagtttgctgcttttgcagcaagcataccaattatctcctttgtttgttctatttcttccagtgcactgtgaggttttttttctttctctgcgtagtatcaccaccatcgtagttgcctctatcgccgagtctctggaaatggtcgtcgttgcacccaagtcctcgtgtttcctacatctcacagttctttgcatttgagtttacccttcttcgcttactctatgccagcctggtcagaacttcaaaccacaagtacctatctggatactttactttgacgattggcatctctgctgactgggttcaattcttgagctcttgtaagttttctcgctatcttcacttggtcatcatttctcaccactgctgtttccttctaaccgacatcgatattttagtgactgaacctctctcatcatggcgcgattctctacccttccagccgagttgcgcgagctgatttgggagtttgcccttccagcgcgagtcgttgagattggagaaccatgcgacccagatatcttaccagaggaagacctcagacgagcatgggtccttaacagaaagtatccaaccattgctcatgtctgtttggaatcacgccgaatcgctctggccaaattcaagctccccaaaggtgttgctcttgcgcaggattgcatgacagatgatcgatggtggtggaagtcgaccgacattattcacttcaatgctccagagattgtcgcaccaacgcaaagatgcatactagaagacaacctattggacttgataagtgttcctattctatgcaaaaaggtctctatcagtgcagacatcgttcacccttttttgcgtttccgtactaggtccgagatcccacactcgatagtatgggaagtgctttcctcaatggagacatgcataatagccctacacacagtctgtatccgagccaccaacgaacaagctcaggagctaggcctctttggcaacggagacgagccagcacagttgattgacccgtttgacaaggcagctatcaggcgattcagacagctctggatggacacaaaacaggaggtctcttcagtcaagttttttgatacaatcgacaccggaagattcacttttcgagtcgaaaggtggctcgcagagatgtcagcggagtacatcgacttcaaatcgaccgatccaccgttcccaaccctaggaccgcgggctataagtgcaggacttcgtcgattcccagctcaaagacacaattccgacgcgaaacaatatcttgtcggatttcccaatctgcatctgaggatcatgtttcgactctgcccacctgcagtggtcgatccggtgattacataaccatcccgcatttgatcgggagattttttgaaggcgattttgtttgaagttcactttcctataactcttaccacatcataacaatgggaaaacgtggcggcaaaaaggtaatcttatctttcagacgttttatatgagacgtttgttgtactgactgtgtctcctttcttacagggtggtagaggccgcggcggtggcggcggcgcaggccgtacgcgcgctcaatggcaagatattaccagacagaacgagaggttcgaacgctactacaatgaacccgagttcattccggaggaggaaaaggaggccttctgggctaccatgcgcaaggatcttcccaacagcttccgtttcactggttctcgagggtaagtcaccactaggcttttttttgcgacgcgccccgggaggtttcaagtaatattgactgttgtttactttcattagacacgcgctggctgtgcagcagagtcttaaggaccgttacattcctgaaatcacttctatcaaatacgaggacgaattcgtcgagcccccgcgcccagtttcgtggtacccagatcagctcgcttggtccatgaccactcctaagaatgtcatccgccgattcgcaccttttgcttcgttccagaagttccttgtcgccgagaccgacgtcggaaatatcagtcgccaggaggttgttagcatgattcctcctctcctcatcgacgctagacctggaatgactgtattggatatgtgcgctgcgccgggcagcaagtctgcgcagctcatggagctgcttcatgcaggtgaggaagatgcgattgcgcaagttactgaacagatcaagaacggcactgctggacctgaacccatcggccccgaaggattgaacgacgatggccgaagcaccggtcttctgattgccaacgacagcgactacaagcgcgctcacatgcttatccaccagatgaagcgcctgagctcgcccaatctaatagtaaccaaccacgatgccacactgttcccatccatcaagctgcctcctctgcccactgccgatggcagcaaaccccaaaacagatatttgaagtttgaccgcatcctggcagatgttccttgctctggcgatggtaccgcacgcaagaacgtcggtgtctggaaggactggacccctggcaatgctctgggactttacagcacgcaatctcgaatcctggttcgcgccctgcaaatgctgaaggtcggtggacgggtcgtctactcaacctgcagtctgaaccccgtggaaaacgaggctgtcattgctactgcaattgaacgctgcggtggcgctgccaacgttaagatcattgattgcagccaggagctgcccggcctcaagagagcttcaggtctgcgaaactggaaagtgatggaccgagagggccgcatgtggaacaactggcaggagatcgaggagcaccgagaccaggagggcatcaatggtcttgccagacttgcagagggcatgttcgccccaacaggcgaagctgccaacctgccgcttgaccgatgcatgcgtgtctacccccaccagcaggatactggaggtttcttcatcacagttcttgagaagacctccgaaatcaaggccaagccggagagcaccaacgttatccccaagggttctattgcagctctcgccgcggaacttgattctaggaagaacgaggtaaatggacagcctctggagaaactcgagtcgctggatgaattagtcactcccgatgaagaggtagaggaagaactcgcaaagaatacctctgttgctgaggccgttcaccaactcccgtactctgctaccctcgatgcatccacccctgcttctcccgtgaaacgggctgcaggtgaccttgaagcagaaattcctgccaagaggagtagactagacgatggcacggaagtcatgctcggtgaccggcccgtccacgccccagcgcatggagtgagaactggccttgacactcctgataacagcacaccttctacctccgcgcctaccgcacagtctttcaagaagaagggtccccgtcaagaggagccgttcaagtaccttgatcctaatcacgaggagcttgttcctatctatgaattctacaagttgtcggatcgattcccccgtgaccgtttcatggtccgcaatgccgaaggtctcccaacccgcacagtttactacaccagtgccttgggacgggacattctcacctgcaatgaaggccatggcatgaagttcgtccactgcggtgtgaagatgttcgttaagcaggatgcacagcgtgagaacgtctgcagatggcgtgttcagaccgatggcctgaaaatcatcgagccgtggctgggccctgaacggtccgtcgttctgaccaaaagggagactctgcgtcgtctcctcgtggagatgttccccaaggtcaccgacgatggctggaagtctctgggcgagattggcgagcaagtgaaggatatccccatggggtgcagcattcttcgcgtccaagcgaacgtcggagaggatggtcttccgtgagttttcccctttcacattcctttgagtgatatttgcgtcttactaacatgaactatagtgaggccatggttctgccattgtggcgatccctctattctttgaaccttatgcttcccaaggaagagcgccgcgccatgttgctgcgtatcttcaatgactccacccctctgatcaacaccacacagaggcagggtgtcaagaccgagccgaccgagccgactgctgaggccgaggacattgcactgaaggaagagaatctcgaggttggacaggaagcgcaggacgaagtggatgatcgtgagacatacaccaaggatggcgatgaggaggatcgcttcaacaccaccgtgtaaatggttttatttttttcctcctaatgcggagatctctttgccgtatcaaaaagccaatatcatgaattccccttaggttcgttcacccttggtagtttcctaagtgagctgcatcattaggaatctcatacaacgtgcaccggctaaattcaggcctccacaacttccccgcaggaaaattgcttacttttaattccgagttgattaaaatctcctgccatttgatatgtggaaaaaatagacccccgcaatgcaacacggagcatccggggacccctcaatttgtctggggtaatgacgaaaggtctggcttgggaaaggggtcattgctatagtagtacagcaatcgcatattcccttgattcgtgtcagacatgtctcgagcctccgtgctatatgaatggcgcaacccctgcattgcaaggaaattggacctgagtccaagtgcttcctctcctctctgtccctagcacaccgcttcacccttgtgtgaattgtcacgaccgccatgaagctctcgtcttcttgggccattgcctgtctggcagcccaggccgctggtgctgctattacccattcgctaaatggctttagtatcaccgagcacccggatcccgttaagcgggatttgctccagaaatacgtatgttgggttggtccttggattaggatgattgtgttgacaagcaaattgtataggtcacttgggatgacaagtctctctttgtcaatggcgagagaatcatgctatttagtggtgaaatccacccatatcggtaagctggaaggcatcaatgagccctttcaagaaagaatcatgctaaccaagattcctgcagtctgcctgttccatctttgtggattgatgtgttccaaaaggttaaggctctaggatttaactgcgtttcattctatatcgactgggctctgctggaaggtaagccgggtcagtatactgctgatggaatatttgctctggagccattcttcgacgccgccaaagaggctggcatctatcttctggcccgtcctggtccctacatcaatgctgaagcatcgggtggtggtttcccgggatggcttcagcgcgtgaatggaactctacgaactagtgatgaggcctacctggaggcaacggacaagtatgtgatcctttcgaaacgtaagacttaaagcacggtgaatactgacatagataattagctacattgccaatgttgccgcaaccatcgcgaagggtcaaatcaccaatggaggacctgtcattctttaccaacccgagaacgagtacagtggcgcttgctgtggatacgacgggtttccagacggtgcctatatgcaatacgtggaggatcaggctcggaatgctggaattgtcgtgcctcttattagcaacgatgcctcagctggtggccacaatgcccctggaactggcgaaggggctgtggatatctatggccacgacagctaccctctcggctttgactgcgcaaacccttctacttggccagcgggtaatctgcccacttatttctataccacacacatggaccagagcccttcgaccccattctctctagttgaggtaagatatatggatatctcctgtgtggactatcaatctaactggagtttagtttcaaggtggtgcctttgatccctggggaggtgttgggttcacgaaatgtgctgctctcctgaaccatgagttcgagagagtgttttataagaacaatctcagcttccgagttgcattcctcaacctatacatggtatgttccggctctcatatcataatcaccattctaatctctcaccggtagatctttggtggtacgaattggggaaatctgggccaccccggtggatacacatcctatgattatggttctccgattactgaatctcgaaacatcacccgggagaagtacagcgagctgaagctgattggtaactttgtcaaagtctcaccggcctaccttctctcaacaccaggagacttgaccacttccaagtacacaacctcgtctgatatagccgtgactcctctgctaggagacgacaacacggcttcgtccttcttcatcgttcgacactccgactactcgagccaagggtccgtcgactataagctcaaggttcctactagtgccggtgaagtgaccattccccagcttggcgggagcctcactctcagcggccgtgattccaagattcatgtcgttaactatgatgtggcgggcaccaacatcctctactcctctgctgaggtgtttacctggacggggtctggtaagtccaagattcttgtcttgtacagcggccccggcgagcatcacgagctggctgtctcttcccagtcgaaggcttcggttattgaaggctcgtcgtcgaacatcaccattaagcaggtgggtaaggcggttgttatcggttgggacgtctcagtcactcgccgtattgtgcaagtgggtgatctgaagataattcttctgggtaagtgctttctccgataccgctctgcttcatcgcaactgactaaactactagatcggaactctgcctacaactactgggtccctcagctcccaaccaagggaacacgccctggttatagttcccaagaggcagccgcctcgtctctcatcgtcaaggctggttacctcgtgcggactgcttatctgcagggcaatgaccttcatctcactgctgatttcaacgccacgaccccgattgaggtaattggcgctccgaccaatgccaagaacctgattatcaacgggaagaaagcgcaggtcaagatcgacaagaacggaatctggtccagcagcgtcgtctataccgcaccgaagatcgagcttcctattctgaagaggctaaagtggaagtctattgatactctacccgagattcaagactcttacgatgattccacatgggttccagcaaacaaacccaccaaaaatagcgtccatgaactcaagactcctatctcgctactctcctctgactacggattccacaccggaaccctcctcttccggggccacttcgtcgcaaccggtaacgagaaaactttcttcgtgcagactcaagggggtagcgcattcggcagctcagtatggttgaacgagaaccacctaggatcatggggtggaatatccattgacagcgaccacaacagaacctacacactaccaactctaaagaagggcaagtcgtacgtgttcaccgtagtcgtggacaacatgggcctagacgaaaattggatcatcggcgaagaggaaatgaagaaccctcgcggtatcctgaactacgacctgtccggtcgctccgctagtgacatcagctggaagctgaccggaaacctgggtggcgaggactacctggacaaagtacgcggcccactcaacgagggaggcctatacgccgagcgccagggattccaccagacccagccgccgacccagagctggatatccgacagccccttcgacggcctgtctgcccctggaatcaagttttacagtgcaaacttcgatttgaacatcgagaagggctgggatgttcctctgtactttaacttcgggaacaccacctcctcgcccgcggcttaccgtgtccagctctatgtcaacgggtaccagtacgccaagtatgtgaacaatatcggtcctcagacgagcttccctgttcccgagggtattctcaactaccagggtaccaactatttggctttgagtctgtgggtgcttgagtcggatggtgctaagttggagagtctggacttgattcatactactcctgtgctgacggcgctgaaggttgagtcggtggatcagcctaagtataagaagcgtcaagcggcttattaggtatctaatgccaagtaagtaaataatgcagagtatacaatacaaagagtatgagccaaaaacaaaaagaaaccgcaatattattgttcgaggtcacgtgacttttatgtacagtacgctcccaacgatcattagtcccagctgtagatagtttctcttgtcctcttcacgcaatctgatattttccagagcatttacattcttcatgtagctctctcgtctctatatccgacatttatctacaatataatgaatagatcagactatcatccaaaatatctgaagtatcaaaagtactccgtagggcttccagggtcatctccacttctccgcagatcccagccaccccagcccagcctctgcccagcctccctcttctacttttggtgtgacatttttgtgcttttctaacatccttcaacattatacggagtattctcaataaaacccactcctctgacaccgcatatgccatcaaactccacaagcgcgcattagctcacaagctgacctcaaatcacccactcgctcgaatcaagatacccaagccctcgtgcctctcgaaatctacgcactctcacatttccaaaattaaagaccaaacgaccaggcatcatgtcgtccctccctctcgacaccttcgacctagacccgacaaaacccaacctcaacgcaagggacctgaacgccaaccttctccacaccgacacctccctccaaaaacgctacacaacaatctcgatcccatcaacatacggccgactacaaacaagcccggccgccggcacagtagtgggaatcatactaggaagcgtagcaggcttcgtactgctaatgtacgtactcttcctcgcggtgaacccggggggcattgcacggggcggcgtagccgcgccaacctcatcctcgatatcgatgtcgatgtcgatggacgaagaagaggtcgtggaggtgcgcaagcggcgcggctcatccgctggacggcgccgacgcgacatcatcgaggtcgaggaaagagagggcttccgcgatagttatcggcgtcgtccgacgtcgagacatgatcgtgtcgttgtagaggagtctctggctacttctactactggggaggatgttattgaggttgaggaagaggagtcttcggtgccttctgatatttcgccgcgtccgccgcggagatctaggaggagtgggattaggcatgttgatcctatggcttatggtgggggtagtgattatagtaaccatcggtgattcggggtgtgctctggaggtttgggatgcgatataccatttttgcttatattctatgttttatgtcttatgattgattcttcgaatgagttttagggtctccaaattatggctaacgcatgatgtcttcgagacgagccttggtgaaagacagaagatgacccacaatgatttagcggcccctgcagtatataaagaatgaatggcgttgtctatcaaattatattgctaataggataacaggatctacttgctgtccgaagtatcagtggccgtccacttgtacttggcccccgggtgatcgctgctcagcctgccatccgagaaatgaggtccaagataattctctcgtgttgttcgtccttcggccgcgactggatcccagaagacgcctcgcgatttgagctcggggatcagatacttgactacgtcctctagatctcccggcccgactgcatatgatatattaaagccgtcaacatcagtctcggaaatccacctctcgagtatatcagcaactgttttagcagagccgatagcacgggggtgtggtccaccaagtgcaagctcctgcgcaactcggtgctttgtccatttaatgccatcgctgccggggatcgtagccctccaactagagacgatactttgaatggccccgggtccactgaactcgaagttatcatcatctgcgtactttcccagatctgcgcctgtccagcctccaaatagtgcgagcgatccatccaggtcggcataagacaaatattcatcatacttctgttgggcacgctcatcggtttcgtcgacaatgataagaatgcctacgatcagcttcagcccgttcaaatcccggccctgttccaatgcgctccgtcgaacatcttggacattctttcggacagaatctatatgcattccaggaagaaacatagtttctgcgtgtttggtcgcaaatgccatacccgctttgctcgcccctgcctggaaaatgaagggagtccgctgcctggagggctcgacaagatgcggaccagcaaccttgaagtgtttcctatagctgatatcaataccgcataggaattcagttgaatttaagggactcacccttcgtggttgatacgccgaacccggtcagggtgcgtatatgtcttcaagtcgcggtcgagaataacggcgtcgtcccgccaagacccttcaaggagcttgtagacaacctcgagaaactcgtctgcgatctggtatcgctcatcatggctgatttgctgttccatacccaggttttttgctgcactctcgagatagcttgtaacaacattccacgctacacggccgttggtcaggtggtccagggttgagtatcgccgggcaagcaagaacggcgattcataggtagtagatgctgtgatgccaaacgagagcgacttggtgacagccgccatagcagcaatgggggcgctaggttgcgataagtgaattggttcatagaagtagcaaaaagttttaggaacctacgatgggtcagagattggaaattgggcagcacctggaagcacctctcggatgtttcccggaccattatagacatcgtaaatgcccagcatatctgcgaggaaaagcccatggaaattgccgtcgaggattttcgccaactcgatccagtacgcgatttccttgtaccggtgagtttggtttttcgggtgcctccatagccctatattgaaagtgttggccatttgaagagttgggctagtatagtacttttaattacctggagcgacatgagtcgggctgctcatggaaaaggcgttgaggatccatttcttgggttctgaggccatcttcggcgtggaattggatgaattgatgcaggagctgttagtacgcactgtcgaacgccctgaacatttaactttattggcccttgctgtgttaaataggtccttatcctgatagaaatggctgctgtgacgtgattcagccaagttatgacactactatgggggcattagggcttgacattgcggaatggcacatactatctaattaatgttagattcgtttctcaaagaggatttgacagactaaatccatggatagataccagatctgattgctcatgtacgggtatctggcacaagttgctgtgacgtgatttggctaagttatggctctacgatggggaaatcagggtctgatgttgcgagatttcaccggcacgcggtgtacaccagcaagctgtgcactcaaaatacatagtagccgtcctactgcctcaataatacctttcctagaaaacataagaattaggtatcttttatatagcacgctcatataaaaggtacatgcacgtagacctcattctctcaatcctccgactagtcagaggaagaacacggatattaaaataatgaaggctggtctaattaatttgctagaaaatattaatatatcccacgtggagacttgaagaccatatttggaaacactatataagagatgtatgtacctagagatagttacttaatgcactgatactgaacaaaatagacttcttttacactgtacataccaatagactttccctaagtatgcccaggaccgagaagtccctataatgcataatgtctgtatacccgtatggccaagccttatggggatgccatgtggaaatttctgctttgtgggacccctaaactgtacctgggaaagatatggggacgacggtagggcggctaaatgctacatccatacctcaacgaccatgttttacctctcgaggtccttatttgtcgatggtcgtcgataaggtttatttgcactatatatttcaatcttgaagaaagaagaagactatttcatcaatctaaggattaccgacacttacattattactaaaagctagaaatgtacatagcgcaatcgcaaagccatatatgttttcaaaaactcactggagaggcgagatatcacttataagtataatgctataaggagaattctatatgcaccaccgtcactaagatataaagatatcatttatcgcatttactatgtgcatcggactgcagctcgcttatgtgcgcagatcgacgtcaaagactggatttgattgcttgtgcatctggcgcaagattggtcgttgtgacgtgatccagccaaggtatggcactatgataagggaattaggcgttggcattatggattggcacatacctaactagggcttttggagtcgattccccaaaagattcgctgtactaaatactggatctgattcctcatgtaggattggtagatttgatactccactatgactcttgtgccttcaggtatgagctcttagagactatatatgacgaaatcgcgcggaatttcgtatcggagatagctttcagcacattggaaccactcagaattctcaaatcattgatactaagcggaacgatcaaccgagtgaggaaagcgtctaaccgatggaagaggccgaggctagagctttgcgccatagatctagtatgaaaggttttcaggtgctggcggggacataaagcaggtaaaagtctcggtagctgcacgtctaggaaagtgcaattcttcccgtgcatgatttttcgcctgtcagatttgacaccatgagtgagaccgcaagtccagtgccgcccctatcccagggagtcgggtatggagttgtcattggattgggagtcgctttcgctataggtaattcgctcagccctacaagcagcctgtgaattgccagtaacattgttcccgccaggcatggtattcaccacaagagcattgaagaaagtgttcggtgaagacagtaacacaacagagacgtaaggaaccaggcacctagttgtgaaatccagctaactccagtagcttcatggttgcaaaccgaagcgtcggaacaggattgactgcgtccgcggttatctcgtcctggaccttcacttccgctcttctaggcgcaccatacctcacctactggcacggaattgctctgccaatctggtgggccaacggacagagtgttatgatctgctgctttgcctacatggcaatccaggccaagctcaaggcgccaaatgcgcacaccctcctcgagctcatacgcgtacgctatggtcgtgctgcacatatcatatggatcataatggctcttctcaacaacatcttcaatttcacgtccatgctggtaggagcatcaactgcagtttccgccctgactggcatgaacgtatacgcctgcacatacctgttgccgctaggtgtcgtcgtgtatacatactggggtggactgagggctacatttttgacagactatatccacacattcatcatcatgattatcctggtgtggttcaccctcaaagttcttaccgtcgctgaaatcggttcactcactgcattctacgatctggtcaagtctcttccgcaggaagggacagtcgccggcaaccatgcgggatcatatctatcaatgaacagcaacgagtctttgttcttcggcattatccatatcgtcaccaacttcggaattgtattcatggatacgggcttctggcagaagggattctctgcagatattgcagccgcagttcccggatatatcatcggtggaaatgcctacttcgcgatcccgttcacttttggcacggttgttggtcttggtatgtgtcctcataattaacccgtgtcaatatctaacctccctttaggagccctcgtcttggaacagacccccatatggccgacctaccctcgcagaatgacccaggctgaggtctctggggggttggtactgccctatacggcgcaggcagttgctggaaagggaggtgccgcggcaattctgttgattctgtttatggcgtgcaccagtgtcgcatccgctcagctcattgccgtcagctcaattgtctcatttgacatttacgggtcgtacttcaataaaaaccccacggaccagcagttgatccgatggtcgcatgtgggcgtcgtcggatgcgcactgttcatttcgacctttgctaccgtgctccataagggtggagtcgacctcaactggactatatatatgattggcatcgttatttggtatttctcaattaccccaagagaactatattctcactaacagaccttatagccccggaacctttccaacatgctttgcgcttctctggaagaaacaatcccgcgtcgccgccattgtggcgcccatcgtgggtatggcttctggatttgccatctggttcgcgactgcctataagctgtatggggagatcagtatcattacgacgggcgagactctgccttgcatgtatgcatgtctcacgtcgatgtttgtcccgcttccagtatcagtggtattgtcttacctgcggccctcagactttgactgggacgagttcctcaaaatcgaaagaatcagcgataaaagtgattcacagccgcaatttgaccgtgagagttatttcagtccggaacgagtgaagtatatgaagcgcatgtcaaaaattgccgccatctgggccgtggcaacattcatgggccagatcgttctctggcctctgcccatgtacggcgcaaagacagtgatgtccaaggggctgtttgtggcctggttggttgtgggcctgatctggctgttcatcacgctgcttgttgccaacttttatcctcttgtcgacggtggattgcagcagatctggcaggtcatcgctgtagttagaaagaccactaaagatgactcgtccgaggtcattgaggtggatgtcatcccggagacgaagtcgtaactcacatagaatacgggctggaactggttgggccctaatcctcatcattagcacagatcactcgatttatatctacgacatggtcataagcaacgaaattaactgctaccaactggcaaatgttaaacaaaatttattacaggaatcggaagcttctattaaaatataacaaacgctttagctatgttagtaaatacatctcttaccggacaataggctagatatataatgtatctggtaaagtacacttcgacctgtattgctcaatactattgtaaaaagaaaaaaaatgccaacgatgtaactagttgttagttaactagagcctatgctatgacaaactcaagttggtcgatccactccttgaaggaaattgtgccgtgtctttcgttgtaacacctggaagaataaagaagacgaattttttgtcgatcgtggaaagggtcgacgaccgttatttttgctcgttggtaagccatggctctgatgttcatgttttgtaacctagagtgatcacgtagatatgcaaccacctctcgacagatccgcagactttcgtctttatgctctctttctagaggtttcgagatcctgaaatcacttgtccgggtgaggctgtcgagagtcaaatgtttcagggtgtgtagggctgtttgtagcatatgcctgaaggatacagtggttatgacttagctcagtgagaggaccgatagacgagaaaacttgaactgttgtgagatccagtcgaggtgtgcgtccgtcaggtcaaggccggctttctgtcggcagaacaaagagggatttatacctgcgagatgcatggtgagatccagactctctaagctcggggctgcctgaacaaagagcggcagcagtctcttcttctctctttcggggagatttttcctttcttgccagaccactgattcctgtagcaggaacgccacttcttctttgtcttcgcgtaagtgttgccgctcactatcttgggtatgggctgaggaaatgcgaacagacaagtgctgcagccgttgaagaattggcgtcaaggcttcttcttccgctggtgtgaggtctagttcatcatccaccatcatcccaccagaagtttcaagcctttcgatccgagtgtgggttgtaccgagggtggctaacagtgtggaaaaaacataggactgaaaaagactcccccgaaaggaactactacgagcacacttgtcagcaccccgggttagggagctaggataaaccagattgaagccaagttgtgtccgcaaacttcctatccctctcatgatcctgggaaatctcttagtttcgtcctcctgatgaccgtgatagtttctcagtcctgccatacgcagattggaaaaagaaggcaggcagctctctagtgcatctcgaaggggcgtttttgtggtgcttccctctagagatgacaaaagaatgttgaagtggtcgactactgcatccttgtagatgagataacgactttctaacggtacgtcacacattaaggcaagcagattattctaatattgttggccgccttaccggctgccttgcaggaagaaggaggggggaatcgtgaaggaaggaggagagttggagagaagtcgtagccgttgtccctgaagttccagagtttcctacgattgaatgagtcgcttaatatcctcaagtgcccacgtgtagtccgcacaaaaaatggtcggtacaatccacattgtctagcctcaagaatcagtttatattcgacgcattgcatggcaagaggtatgaatacacataccgtaacatatctgctgaagatttcgtggccagccacgtaccttaacgctcgtagaccatcgcttgtaagtgtaatgtagatttaaccaaagatcaaattagcaaggtagtggtaggttcccagtgcaaatgcactgcaacccagtcgtagtgcacaaacgtccttgatcttcagttttcgacatatttaggcccataactctggaggtagagaattcatagaaatttccatcatttggggaatctgacgttgaagataaaggcaaaaaaaagaatagtactgagaagttgggaaactactggtatgcgttttgggcgcctggcaggattataacgaaaaacgaatacctgtttctacgaacaggtaccggcgcaccaattaatccgccatactaataacgaatttttctcgttatgaactttgttgatcattcatcccatacaaaattcgttataactgttacgatcctatatatagtgagtgtcctgtgtcctagtgtatagcggccgacagtcggatgcctagttttaatggttttatagcctaatgaggactagctcttactagttttagactggcaggaaattaaaatgcctgaattactatgacagatctcctagtaagcagagtactaaaggccttccgatagctacagtacagtactacttcgtagactggcaaatgatttagccaaactgatctatatggcgttgtggtctgtgagtctgaatctttcctcaatgccggttatgccgtcaccgagtgtgccggttgaccatagcaaaaactaagcatctgttctattttacgtctgacacataatcccatttgcataaaggtgttggtaggactgtgagagtaccctgcagagaaacatgcatataagactttggttccaccttgtttaggtatttcaagactgcaagaagcgacatatgactcttacacggacaattcccttgtcgtcagtgctaatttgtcaaaaaatgccctccatcatgataagccatcttcatcttccgcaaacaaatttctaaattgttctaatctccaaaatggaaactcgccttccaaggctgtgcagatatcccattctaaagattgaatagtactgatcactcaacagcatcccgattgaagatacaacatgataaatcttcggctagtaagccatctgttctccaaataacctagctcttcttaaccaaataaagatgccatgcggccttccaggagacgtaaagctcgccatcaaagccgttcatcaaacatacaaatccggcatatggtcgcgtgcgagtcgtatctacccgatctataaactttcttttacggttatcttcgaaatttccttatatatagcgactgaaaatgaaaatgaagaattaggtagaacatcataaaccagctcgagggaaaagtaaacaaaaagtagtgtaaaaaatcattgtagtacaattgaggcccaaaccccaggaccaggacccaagaacgccatgtcctgttgtgcgccagcgataagtaataagagtcaaggatatatacaagggagcaaaaaaacgatcacaccctgagaccaatttccaacccaggattcacaaagcaccagttcccgagtcaaatgccaatcccaggaaactccaatatctatctctcgatggttctctcaggagtatcgtgtttgcgcgactggaaaagacactccaacaccagccaaaaaccaaagcgtagtcacgtattaaaaaacaaggccaaaatgaggcctagaacaacatatccaagcagcagcagcaagccattgcagccatgatacccgcgcaaatgccacctgcaccaccgccggagttcccgcggtcattggcatagtaaccctgtggcggctgttgagggtactgctgcggcgggtaatacatcggctgctggccttgggcgtaatagccctgcgggttttgctgtggctgggcatagccttgctggggtgggtagtagccctgctgtggttgctggccgccgccgtagtagtcgttcgcagcgccggggctttgatgcggttgttggtagtaggggcctgagtcgtggacctgggcagggtaggaaggtggcgggcttgtctagaagggatttatatttagcatttgtgttttaagcaggcttgcgattgattgttcttgtacttacgggtttgttgtaagacatggctgaagccgaatgtggagttcccgggatgtcagacttagtgcggatttggggagattgcgcagtagatgtggatttgggggctgtttctctgtcggattggttcggtgtatactcgaaacccgcgaacagtaaggaaagagtggtgatagaaataaagagtaggaagtgccggaatcgaggaagagttgcagtggcgcagttcggggattagtcaaccgatttccagggttttccacgttccaagactttatacttacgcggcctcattttcgtaccccgtggatatacctaccagaacaataatgcataaatctattttttgggtgttttcctttataatttttagttgatatgatagaaatgattagttacaaaatatggattgcaggaaacagagatgtctttttatagtcttatatatagccagaaggatacatagtaattggctatagatgtcggcaaaatacagacgactttgccatatatagtatatggaatatcgcgtagacagtagcctatatgaatgtgagcagacattaagcatgatctacaacttccttctcacctgaactcggaagacagccattcatagattggattcatctagagatacaaagacacgggccattatgttaaatcacaggcaaacaccccatcgaaatcccctgaagcaggagaaagttcgcgcctatacgccatgctgcccataatacaaaggggagaccaaaaactttttttgtgtttgttgaatgtgagtcaatgagtaaaaaaagtaactcccaggtgtccacttctgtctggcatcggctgctctctcgactgccagttgggtatttcctgcagagttgcgagtatggaaaaaggtcatatcggagacagtaagtggacctgatgcgattcgaatttgcgaggttgaggttcacaggaaccggggtttggttttgcaaaatccccaaatgaaagaaaagagaaagaagagaaagatctagcgtgagctcatgctgaagaggcgcatatcaatcctgtcccatttgcagcaaccttgttttgcagcttaaatgacccagcggtaactggcatagcgacctgcagtctcagacttgcgaatgatcttaacgacctggccacggcgcaacccaagatagcgggcaacaggatccgagatctgtatgcggggcaattgagactccttcagacggtagcgctcgagaagcttgcccttctcctcggggctaagcaggacgtgcttggggactagctcgtggcgggtgatgttgacgagcagatcttgttcctggaagtgttcgcagatgcggccggggacgccggaaagcaggcgcacggcagagggtgagataggcgtctgcgtgatgaagataccagtgtggaagttgttctcatcgacaaggtggttgaaggcgcgcacttgcttggttccgacacctgaggagtcggggcagaagtcgacgtaaattgtgccgcagtctggctgggggtttgggtttgctttgctgggaagtggtgtgtacttcatcttcatggtatcggtggggcgggcttggattttcatcttggtgcgactattgttgcggaactattagtgatatgtgccttttcaatgacgtgtgccggcattgactagctcaaatttccactatctcaagacaatggggcggtggacgcagggattcacgtactcggggtagcccagagggtcagcatattttgcgcggaagtcttctagcgggagtaccagctcgttatcagatacttcgtagccctggtgtgtcgccgatggttagccttgggtaaacgggcattataggagagacactgagaagtcagggactcgatctggggtacctacccggtcagcgagcagttcatagactgttctaaatgtgcgccagagccgagtcatctcgcgctcggcttccatggagtgtgccgaatccccatccatgatggagtgagaagttgacgactaggagagaaaaggtaatcaagtactatctcgcctggagggtttaaaaagaaaaaatttggatagaaagagctccggtggagagataaaggtgaagtcgaaaaatcggcgggaactttctgccagcgacgcttaagcggagaaaccgaccgaaccattttaattattccaagtttccccttttcagtttcgctttagtctgttggtctatataatcccttcaggatcctcggaaggcaatttgtctcttccttctctctgtctctctttttacattcaattcgtcgcaatggctgccactgatgcggagcgggttaagcccaccaagcccgacgaggccgcctacaagaccagtctcgctgaggccgagaaggagcacactgctgctcaggagaaattggtatggaagcctgtttctggaattgtcacttgagctctcatctgactctgggtcgcgggggtgattccgacccactattgttgattgtcctcgtgtccattatttacttgcataccatctcctcgggccaatgactgatatgcgcaatagaaccaaatcaaggccaagttggataatgccaagcccagcaaccaggattcgcccatcgtgaagaagcagcaggagctgcgcgccgaactctcagccattcgtcagaagcagtcgggcttcaagtccagccggtcctccatccaggagaagctcaacgccttggacgccaatctcaaggcccgcattactgagcagaacaactctcgcgggcggctctcattcaagagcgtcgatgagatcgacaaggagattgcccgccttgagaagcaggtcgactctggtaccctccgcctggtggatgagcgcaaggctctcaccgaggtctccaacttgcgcaagcagcgcaagagcttcgccggattggacgaggcgcagaagggcatcaacgatatcaagacacagatctccgaactgcgcaagaccctcgacaaccccgaggccaaggccctgagcgacaagtacaacgagatccagaaggagctcgataccatcaaggccgagcaggattccgttttcaagaacctgaacgctttgcgcgatgagcgcaccaagctgcgcaacgagcaacaggaaaagtacactgctattcgcactatcaaggatacttacttcaaggcccgccgtgcctacaaggagtacgaggacgaggcctggcgtatacgccgtgagcgtcagaaggctgagcacgaggcctttgcgcgcgagaagcgcaagaagatcgccgataagaagttggaggaggcctcgcagcttgcctacaccgacgagatcctcactgcacagggtctgatccgtcacttcgatcccgcttatgatttcaccaccctgggtctggatgagaagaaggatgagggcagcaatttccgtgccggagttggccgcactgttgaggccgccgagatcaagggaatgaaggttgtgcgcaaggacgacgaggaggactactttatcggttccggtggtaagaagggcaagaagggcggcaagaagggtggtgccgccgccagtgctgagaacaccaagttcaacatgaatgttggtatcattgaggatttcgccaaggtcaagatcgacccccctatgaaccagtcggatgtcgccgcctccgtggagaagctggctgctaagatcaccgagtggaagaagaaccaggctagcaagacagaagaggtaattattatttccaaggttgtcggttgtgagcagttgctaattaccccgcagaacatcaaaaaggcccaggaagagattacccgcctggaagaggaggagactaaggccaacgcccctcagaccaatggccgggccaccgacgctgccaagaagcccgcccaagacaacatcactccatcagcggaggctgagctggctcaggagaaggatgccgtggccgacgttgaggaggagctcaagaaggctgcgatcgaggaaaaggcatagattcgaggaggaaattatccgtacatgctcaatgcgtcaacttatacatgaagtctagcgtttgtctagcattctcactgcgctttttctttatttttattttttcgtttggctcttgcatatgcattatatctacgattcataagtggacagctggttgtttccaaaaattcatataatcgaagccttttatttcatctagcctaggagataagcccagtcatactctgatcagagttgtacattatcatgtgatatgatattgaattaacttccaaatacttgtcagtcgtatctgtcgtgaatgtatgtaaatgtaggtagtatgtagttatgtatgggtacattattcgcaagactccaaagagaaagagtgccagttatgtccaagccgttggaagtatccaacggatgtcgggagataacaccaacaccaacgctaataatcgcatgagggggaataaaaagagaacaggaagcagtaagcagaaggtatagagggggtacgagatgtgtacatagtctcccaaaccccaaaagaagagactccagtcaaatattgcatgtacaggagacaacaagcctcagccgaaaatgtccagaaaaagaaaaaaagaaaaggaaaacagccgtcacatcatgtcacatcacatcacatcaatattggaagtagttaccgatcatttcgcgataacaaccccccaacatcatgaagctcgacatcagtgtcaagcgtggaatccgaagaaccgggcatcgcaaccgaccgattcccaaaagccgaggcgggaaacggcaggtccgccggcccaggaagcggcgagcgatgcccgaagatagcacgcgacggactgaagatccccaaatcctctaaaaaggcacggctgccgccgcctcgccggcgctgcacaggctccacgggcgaggacaagcacgtctgggcgcgcacatgctccggcccagactccggcagggctcttgtcagcaaaccgccgacatcggagaacgacacgcggcgcggcgtgtctgagggcacgctttggcgcggggactggtttgtgcgcaggtactcgtgcggcgagactttgcgctcgagactgtctgttgtcgaggcgtggtcgtcgtccgagcgacgggttgtcgtgaacgaccatgctggatcgagggcgccggttcgtgcggctggtggggtgatgggcgctggtctggggagacgagttgtgtctggggtgtcggggattgtgtagatgtctgggtctagacggatgcagaggccggttgcgagctcggagtctgagccccattggttttgcatgacggtgtttctgcggaggaaggatttgtccatgctttctgagacggaggctgagccttgggcgcgcttgtatttgagtttcttgacgccgcggtcgcggacgaaggagcctatgacgaggacgttggcgactgctgttgcggcgagaatttcgagggaggcgagaagggaacggtatgattgggcgccgtcattgtcaattacagaagagacgcggtaggaggttacggcgaccaatatcagagataggcagaataggctggatagggtgagtctgcgctttagaggcatttgcgccatgaggattattgggattgggatagccacgaggaggaggtcggtcagcacgtcgcaggaacccattgttattaggttcacgtagccggcgcggcaggttgggcccggatctgggacgacctgcccgtagtgnnnnnnnnnnnnnnnnnnnnnnnnnnnnnnnnnnnnnnnnnnnnnnnnnnnnnnnnnnnnnnnnnnnnnnnnnnnnnnnnnnnnnnnnnnnnnnnnnnnnnnnnnnnnnnnnnnnnnnnnnnnnnnnnnnnnnnnnnnnnnnnnnnnnnnnnnnnnnnnnnnnnnnnnnnnnnnnnnnnnnnnnnnnnnnnnagccggcgcggcgggttgggcccggatctgggacgccctgccagtagtggtagaaaggctggcattcggccagggttgcgatgaccacggctattagggttgagacaaggaagtaggagatgaagcggaggaagaaagttgtcgatcggcgccaggcaagccctgtgactcgctttagaaattcgcacatggtcactttggtcgtccagatgctatagtcgtggttgtgagtcattttgaactaatccaaggtgaagacaagggtgtcttacaagacggcgtagaagatacgcgcagcaagaaccagcttactgcccagctctcgattcgcgatctccttctctgtcaagccgatggtggtggtattgttggtccccaagatgagaacgaaatgcacgaggaccatgcgaatcagcaagggaatgacgctgatcatcatgaccttgtcctcggtgaaaaagcgctcgacgcgaatataacgaccacataggcgcacgacgatgatcaccaaggagaatatggtagcccaccagctcatcatgagcgtcggattgatctcagatctgctctgtatggccggcagattctcggaataaatgccacgcgcgactagcgacatggcgctggaggccatggaggccatgatgcgaaaacagcagtctcgcagaaagcgattcagaatgtgcttttacattgctcgcacgtgggaaagtgtggggatgttttagctggttatggggcgaattgcggagactagggatggaaagtgacgatcttgagatggaagagagatgttctcaggtacgatataacggtcgagggagataggggcaattaataataagtcgccaaaccttgtcgactcaaggccaagtggaagaggggaaatatcaaggatgacaagataagcgaagcctccgtataaacagccagtgaggttcgactggctaatctgggagattcatactttttcaacgacctgatagatctgggtgaatacatcgaacaaagaatagaataatcctctttagcatgacattgttgaccctggcatacaatattcctccaatgagggcgatctgctatagttacggtgtacacgtggacgattaccactttgatagatgcagtcctacgttgcatcgacagggtataaaaggcacaatgtccccgataagcgaggagctctggagagttcgccctggacttctgtattccacggaatctcacgattatctacctccggccctgctccgtcggggaatgttatctcccaaaaccttacctctaaattaatcgcgcaaccctcatccaaccacagcggacgccgaatcttcccgctttgcttcatcgcgaaccgactcgattcccgacccagcacgcagcccacccaatacggtccgcaactcctgtaggaacttggtaacctccgcctccgtaccgacggtgatacggagacagccctcacacccaagctctttcccacggaagcggaccactacaccacgcttctccgccatagcctcgtaagccgcaagcgcagtcacgttactcggtcggccctcggcgtccaggatctccacgagcaagaagttcgcatcgctaccgccaaggaattgccccacaccggggatcgccggtagttcgcggagcaaacgatcgcgttgagcgatgatctgcgagcggaaactgtgcatcactgccatatttggccctgtgagtgccgcggaggcgagcgcgcttgtcgggctggagatgttataaggcgctttgaggctgttgagcagacgtgcgacctccgggctggcgtaggccacgccgaggcggataccagccagaccgaatgccttgctgagagtctgcatgacgactaggttgggccattcggtcacccactctgccaagctggagccttcgggcgcaaagtcaatgtatgcctcgtcgaccaccacgataccattccaggtcgggtgttcgagtaccttacggatgtcctctttgcggatcaggttcgcggtcggattgcccggcgagcagatgtaggccagcttgattgatgggtcggctgatagggcctcgttgactttatcggcttgtagatggaacccgtttgtagcatctagtggtaccttgacgatctcgaggtcgtttacctgtgcgctaacgctgtacattccgtaggtcgggggacatgtgaggatcttgtctttgccgggaacgcagaagcagcgtagtagtgcgtcaattgcttcgtctgagccaacgccgcagaacatgtgctcggggaggagggtcttcggggtgtggtggtgggtattgcggaggttgcagaagagctgcttcaactcaatctggtgactggtgacacatattgttagccaaattggtctgaatgagattcgacagtagaatttcactcacggatcggggtaacggttcaggccgagaaagtcaatctccggattgaaggctcccgtggcattgccagcctgggaggactgcaattctcccttgctgctcagggcaagaccaggcccgaaggcattctcgttggcgtcgaggaggacgttcgtcccatcatctttgtagtcactgactcatttagctcaccgataccggtaatttggaaagggcagcatactctctggcgcatcggtagggctgcaatgccaggatattaggccgggcgcatgtggccaaattaaacggagattttgaagccattgtggtgaccttgggaggagtgtgagacgttgagcaaaagttggtggggtgctcaggtgggtggttttatcggaactctatgagtcaaatgccgatctatgcgtgtatatcttccaaggttcttatgagattccacatttacatatctttacaagtccaatggtattacagacattacggttctactacaatgtcttctgaatatattttcactgctgagaacacaacgcggggtaggtgcttttgttggtttcagcatgtttgggggaaaagatattcatatgaactatatctttaattctttttaggtgacaagaggtggtcagtcagtgaaacagacattggtcaatgcccttcgagatcctacaggataggacatggtatgagaactcggtataacaacagtgcatgtaaacaattaccaagctactctttctctcagcagcaaggctctgaagcaagaagcaagcagcgttaggcgcatgaagatacaatcaagcaataagtattgtcgttctgccattcaagtctttctgaaaattcgcttccacaaccgcttattaccaccctggccgggctgaggttggccctgcgttttcacctggggttttcccaccactggcagtaaaaagaaagcctccaccatctggatgacacaagccgggttattgtcatactgtttctttttgaaatcctcgacaaagccttgtctctctctcgcagtatagttgaagcctcgttcccttgaacaacaatcacacgttggcgtacagtgtccaatgcctttgtttctttctgttctttcgtggcgatcatgacagcatccacagtctcgactacaacagccacctctcttcatgcaattttcgactagttctttccggagataccaagttgtatcttttcgtaggtatcatacgaccgtttgatgggccaataggaagcattatttcggcaaggtaaagcttgtactcggcctcgctatattgccgtagtagaattgtaagctcctgattataatattgtgctgctttatctccatatttgtcggctgctatcttttctataacccgaactttgcgctttagggatttttcttgttggacgatttctcggagacgatattcggctattattatatccacaaagacggcgatattgaaagatcgggtgccataatggagtatgcgtagttgttcttttccatgagctggggcttttgcgtagtgtgcgtcaggcaccaaccttgtctcttcaaacatattgcgagcaccctgcctgatcatgctgacagtttcgaaaagtcaaggagtaaggagaagaagactggaaaagaaagagaatatggcatataaacggacgcccagatgaatacatagtatccggatgacaagagccgctcccaaatcgggtctagcccaaagcctaatcggtacatacctcggaacatccatcaggtaggcgagcagcttccaacgctatagaggggaaatctggaaagaagacctccacaaaaatatgagaaggccgcataagtgaacgatcatgtccgattctttcagatctttaatgatcaatctatgattacataagcatgatctccggccccggggccgaggtcggccctgcctccaagataggcaattttgagacctcaactgggtgaaggaagtcaaaaaaacaaatgtgctcaagaaatcaagcgtccaatttttttatctcaccttgctccttttagcacatttataccaacgcctacaagctagacacccaattgcttattccgcacatttccgattttatcagctcaaatcaaaattcctctcactgggttttatgcaggtcctttgatattggtggctctagcgttcgtaatgaacgaaatggccctaaaaggaccgtcaattttaccggtggatatcatggaatctcaattgtccacgattgacctcctaatggcgatgttcccgtccccgggcgagctggaaatccccgaatccacaacgcagtgtgttgagaaactccgcgactggtgcgagaatccgaccttcacacctcccagaattccctcaagcctctctctcaccgtctgcctaccaattgcagacggagacagaacaatacaagtcaacatttccgtgccactgcaatgtgataatccagagacactggaccaatcaccgtcattgggctattcacttcgacaaccagaatggatgtccagagccgaagttgctggacttactgcctcaataccgcaaggcgatgatgctctagaggcattcgaatatatccaggcagaagccagccgctttcttgaaagcaagcagtctcagaccgtggccccagaagacacatacagggggccaactgtccgagtctggttctattttccatccctgtcaacccgtaaaaagagggatgacatggtcaacctcgcgccgggatatgctctgacaggctttgtgctggcgggcaagccgggcgtattgtgtcttgagggtgcttcgcctgatatcgactcttatatgagtttcatcaagacacattcctggggtgatatccctagctatcagaaaaaagtcagtgagaggtttcgagagacagaaggtgtccagagagtgttttcggggatggaggaaattacggactcgctcggagagcgaggtggtcagcgggccaatcggggtgatatgcaagcactggaggcgtggttggggagtagaggactacaagaagcatttgaaaaagtcatattctaatatattccattgaacaggtctgtttcaataatctcaaccgagatttcatcattactgtggcgtagtagcagctggttgatatcttttgcagcttgataccacaattttgtctggcgttggtttggtattctgagagagaaaggaagtgcaggtgggggagtaaggtcatacctacctgaggcaaacaacggtctcaaaaataaagaatgagaggatgaagaatagcaggagcacaaatcagcattgataaagtacaaccagtttgaggagcggtctcatacttacctaattgggagagagatacctagaccataataaaaaccaaggttccgggccatattcggtcattcattgttcattgtccattgtttaccctaaacatttgtaacccaccgaacgatttctcaactcatcaactaacatccatttgtccattttgcttttaatataccctcgtctaatcgaaatgccccctgacttctccacattgaggcatcgtgagcgccaacgggccgcagcctacttacaggctcgcagtgaagtcattgccgctatcgacgcgatttataagcgggtcgaaatctacagctctgcccaaatcaaccccacctcctacaagtctcttggtattgattaccgattgcttgagctagatgatgatgggaaacatcttcagcccccaaactccgatctctccaccccgattttcttcgagcctcgaggtgcaacgtgggtggcccctgttcgtattactgatgtcgaatgtgagggcgatctaagggcaatcaccgacggatgggagaacgtcaaagacaacccactagtccagagctttcatgcccaggtctggtatgtctatttgggtttggagcggatgtttttccagttccgccgagagttctaccctgaaggagatagcagagttccacctaaccttaggcaaatatccaaatggctgaagaggtaagaaatctaccgcctttgcgatacgattgggatactaactcacgttcgctttatagtggaactattgtaccatctgtttttgccgaaagattttactcggctatctggggatcaatgcgatgggcaccggcatctgcctttgtgccgaagaaactgttatatcctggaaaaccgcatactctaatcattattttgattcaagaagaacccagcgaagagctatctcgcgcagaaatgatgacccttaccgcagccatgatcacgcgtcttgagggagaggaatgtttagaatataacactattcctgtgagtatggatttaagatctatatacttatctttcatgcaagctaatatatgttaacaacataggttatggctatcacgatttttggaagaatgaaagctcgagtactcgaagcccattctagccagcaagagctagtcgtcaagaagacccagcttcttgatttctcgacaaaccaagtcgctaacaagagcatgaatattctgcttggatttatggctggtgacctggtcggagatcctagaggacccacagttcctacggatatttcaaaggtttgtgctccagatataatcgacttgggaagcacgctgacaatgaagtagacttcacgaacagccgagaaggtaaacaccgcgaaaggaggaaccattcggaagatgttccgcaaaatgcgcccacgagtcgtggcaggtacagagccagagccatcggagggagctacccagtaaccaaacttccaatggagccttttattacgctgcaacggtgacaggggattaatatctacatctggtcctaagtcacgcggcaagaaccaaagacaccttggctattcctaaactcagtcgctagttcacatatcaataagtctttacttggaattgaattgatttgctcaaagtctcttacaccatctgtaagaataagatagaaagtgaagaatataatcacgacagttggtttttatttcgcgaagtagacgacaagcaaggctgagtggcttcaggctactggcatgacaatgaggatggctgcgagaacaaccctaccgaactcatgcatatcattgactgaccctgtgtcgaagggaccgaatgttctcatgacgaggaatgcgtcagtgttttgtccattgctcaaacactcttcgtatcctttatcgaagggcacgaacgtgatgaaaagctcatgtcggtcttgtgaaatcaataggaagctagaagataggcgtcattggttattcaagctctttgaagccacttattggacgtcgaatatccaaagactgttagacttactgctcgttgaagtgggccatctgcccgtggcagctcatcgaccaccccgcgacttcacatgcctcttgcgtaaggatagcgtcggtgtttacttggcgcattctcctctttacttctacgatggcgaagataccaatcgtattctttgaccgtaatgcgccatccgtatacgcggtagacttggtctggtggaattgactcccgaagtgcacgcggttaatcacccactctagctttgagtggacaagttgagagatactttgaagaaggatgatggcggcggcattcggtattgcctcgtcctcggcatcaggaagttggcccatttgcatatcgtcacgaataccgtggacagttatcgtttgctcttgtaatcttcttgcggtagagaaagaccctggccacatagtactagtctccccgatatcgtcgattgaatcatttgtatcgaggagatgcatgtatcgggaccattcagccgaggcagcgaggatacccgcagctgtgtctaaagcttcagtggtgaacccaaattggtggtatttgtcattgaaagacgcgacagggtatattgggcgcgagtacgagcggatcatcgcagattggacctcggtggcctccgaggcggacgcaatccagtcggctgggatggtatggatagtttcatttctcaagccggctttgtggctgacaaggtcattccaatcctcctcgtctgctgggatatagaaatcatcgatttttgcgagttgacgagcagttggctgtttctgggcttgagccatcgttctaagtcctcgcaaaggtccaatcagtaagacacacgaaagggggggggtctgggattaacagaaatggcctcataatagtgagctacaatacctgaccagaagtagaatgcagaagaatttcgagagatttatgatcggtgatgagtgatgggtgggttgtaaaaaagtacagatgagcttggctaggaattatattgcggtgcctcggtgatgaaagcctaatttaactgctgtgggtgtacgaggggtatggtctacttgataggaggggatgccagctgagtaacttctgttacgatcaagggtcgttggttccttccccgtaggaatcgtgccttcctaaggcggaagcgagcgtaccgggttttgcatgatttgcaagggaagggcatagaataatgatttattttaagcggcatacggcagctagctgagcaacgagatgaggaatcagtactccgaggcttcaaagtagggcaaggccagcgaaatatctgggattgttaaagggacccccctttgaccaatgcgacccccccggcctattttttgtgattcggcttaccgccttccacaccgccttagtgtcgaactccctagcaagacggtagatacctacaatttgtatataaaccactaacaaaactaagtcacgtttatcacatcagctacttcatcgtcaacaactactgcaacaactactccaaagaccgctctatcatcataaatagattcaaggatataggcatgagataaaatacacgtttttttctgatcaaaacgtaaggtttttttgactatgtaaaaccagaattcaaaagtgcagaattaagtctggcaaaattgaattgatgcttgattagtaagacaaaatactgaaaagtcaggcagacgggtcgggcgaattagaaagaagaaaaaaaataaaaaaataaattgaatctgtatagtttagacaaatgaaaggctctatgtagtccgtatgtatcgggtccaataaaaattccctgctgatgcacagataccagatacatcattgatgattttgatatatgggtcacaaaaatccacaacgcctccatatgccacatgtctgcaacttagggcttttggtcaaatatactcgagtcgcctattctgcctttgtctccttcggctccaatgtcttcggtgcttcggcgggctttttcaccacagcggggggttcgggtgctgaaggggctgccatctgagagtgcttgtgcttctcgcgtttctccataaggtaagtccaactcttactaaggcctgccgtgaacggtgccttgatcgtctggacagtacttggccagcggattgtcttctcaatggtcttggagacctcctcctgaagatcatcatctccagcaatccgtcgctcaaacgaaccgccttcaggccggcgaagaacctcgtccgaatccttgctctcctgcatcaacttattgaaatcggcccgggggatgccaaagcgagactggtactggaagtacaacttttgccggaaagcttcaggcagacgacgaaccatgttaccacgcatcacggggtccatatcttgcgccatggctaagatggcgttcgggtcatcgatccaatcctcgttgctgcagcgggggtcctggaaagtgacattgggcaaattttcgatgagcggtgcgtaaagccggcggaagttcgccatttgtcctgaaacaatctttcgcaccttgccggggtcctcggcggggaggctcatgcgtagatctcccatgtagctcatacctgcgattgtggtatataactcgaattcactgaatctctctggcagtaatagcagtgcaacacgcaaagcagacagcaagttcatttggttggccaatcgcaccttcgggtggtcacgcaagatcttgacgggcttctgcagacgaccggcgagatacatggtgtcccactgggtgaggtctcgacataacgtatctaggttcaccacaccatatttgatcattgtcccgttcacggtgatataaggatggaagtagacacccgcgccaaagcggtcctgtacctgagagaccacgtacgaccccagcgagcctaatgcagaataatgatcacgatgctggtgtagattgatatcatgccaatgctgggagtatgacactccgaaaatgaagtcaatcatcttcccggagcccttttgcatattttggatggccgagggtgccgaggggtgcagtgagctggatggcaccccgctgccagtctgcggaaagacacccgatccataggcaaatgcgtagcgaattggtgctctgaactgccaaaggatcattcgcaatgcctccttgaaatcttggtttatgaccatatgctggttgactccgaagtccttagagggaagttccgagaaattggtaattgacaagttcggattttcgtcccagttctcgggtaacagcagagaggatgacgtcgagaagtaggaggaggatgagttgttggtaaacaccttgcatagcagatgcgaagagctggtatttgccgagggccggccattgtagggggtaattggattgcaattgaatgacaggaagcgagtcgaagaaggaacaatacgtcgggaggagcgaagggtgcggcgaagggtgcgagggcgccagagagagctggggttagctcctcgggaagcaaccatctaacagataagttgtagcgggatcatcgggtacggtaggggatcagacatactgttactcccggcatgattagggttgaggcgaaaggaatcgaggggtgtagcgcaattaataaagtcaagtcaacgagcccgcatataaagcaaatgagtgagtgaattgaagtgaaatgaatttggacgccccccgtcaacatttccggctctgacgtactccccgtccctctccgcttctaattcgggtgctgagtcatggtcacgtggacgcgtgtcgaaggatgcataacaaccaaaagtaaacagacgcggaggatcaacaaccacgactctttcgacaaattcgcctacttccccgacgaagggttgctttaaatgttgagcattagtactaattgtatctgacctccctgatatctcgccatgggctctgaaatggatacctttgcggcccgcctagccagcttcgatttagtgctgaagccggagaaacgcagatcttccggcacaaaaacacccaaagcgattacatggccgcaccagcgaccttcaccagctgaggtatgtcattcttcgaagagattacacgcgccgtttaagatgattgacttggcgggattatagttggcacacgctggattctactacaaaccatacgagacaaatcccgacaacacaacatgtttccagtgccaccgggcgctggatggctgggaggaggacgacaatcccatcacagagcatctcaagcatgcgcccgactgcggatgggccatcatgatggacctccaacagagtagctccaaccccgcctcgattgaagaccctacgggcgaccgaattacgcaagcgagactggcaacatttggtacagtgtggcctcatgacgggaaaaagggctgggtatgccagtcggagaaggtaaatcgtgacttcaccgtattcatattattttggctcacaacaatgacagatggtagaaggcggatggtatttctgccctacagacgagagcaatgacctggccagttgtgtctattgcaagttgtctttggacggttgggagcccaaagacgacccattgtgagtatccatcgctctttcttagttggacgattgctgacttaccccagtgacgaacactatcgccgctcctcggattgttcattctttgtcttcgcccagccaccaggaaagaagagcaaatccgctcgtgctaagaaacctcgggtttccaaggcatcctcccggctctcaacccagtccgttggttcagttgcatccgaagcgcccgatatggaagtagatgacccgatgggccaaagcatcatgtcccaatccagcacaaaatccaaatctacgaagaaggcaccgaagagcaaatcaaaggggaccaagactaagaaggaagaaccagcggaggtggaaagccaaattgacgccgaaattgaagaagtcgcccaaacagagcctgtcaaacctaaacgtgcaggcaaaggaaagaagaggaccagtgaggatatcaaggatgaaccaaacccagttgccatggaggaaaaagagccatcgcagccgccagcagaacctccagcgaagagacgcgacacaaaaacacgcagcagcagcattactcgcagctacaattatgaacacagtgactctgcaatggcagacgcaaggccggtggatgaagctacttcggaagaagaaaccacgagaggtcgcaagcccacgagaaagagagcgtccaagacccgcaaggtctccgatgttcctgttgcatcaaaagccccgtcaaaggcgcgagctcctcgtgactccgagatcgaagcggaaatcgaagcaggcctcgaagctgatatccccacacctgccgaacccgagcctgagatcgaggctgagccagcagagccacgggcgtcgaagaagacaaaatcgagcaaaaagtccaaggctgtggctagaattcccgaagcgaccgtgcataatcaagtagaagatgtcagtgatcgcgaggaccgttcagatccccacgtggaaccggttgatgatgaaccggaggcgccagccccaaagaccaagctggcaaaaggatctaagaagaaggggacaaagaaaatcaagaccgaggagacgataaaagcacagtcgccagagcctcgagaatccttagggctcaggggtcccgatgttcgggatgattccgagcgtcatgactccttcgtctccgtcgagattattagcaaggagccggagaatgcaccggagcccgaagaaccaatcgccaaggctgaatcgaagaagatttccaagaagaaggatggcacatcaacgaaagagaagaagtccaagaaatccgagaaaaaggcggagcaagctcctgttcttcaaccctcagtcgaagaacatcgcgccgaaccgtcagtcgaggaacaagacgatgaattcgagactacagacgatttgcctgaccagcttgagatagtcaacccttcccctccacaacaaatatctcccgagccacaatctcatattaagacacccagtctaccgccaaagactgccaaacggtatagcgatatcccacacgaagagcatcttgcggagaccttagtccaaagccagatctcccctcacgaagtgcatgagcctcgacggaattcaaaccgctctaaccgggccgtttcaccacttcctccagcccaccaaaacactccctcgccgtcaccccagtcatcagatgcagaaaaccggccgccatcgcggccctcagcatcccgtgcaccagtccaaccaacacccaagcaacctgagttccgagtccccctggcagttagtaccccatcgccatctaagcgcaacgccaatggtggattcggaccttctggccatccatggacaccggtggatattgatgaagtgctgtttggagaggctagcgagaaggaaaacgcagatttatccggactgttcagaggcgcgaaagccagcttgactagcccagagaagaaaatgacagtccaagaatggatcgcgtggaacgcaaagaatggcgaagaacgactgaagcgagaatgcgagcgacttgtcagccaattcgagaaggaaggtggccgagcaatgcgacggctcgaagctatcgagtgcatcgactaatcaacaggtacgctatgtttttggatgatatgatttgcatgttaggcgttatgctgggtgttggggaacccttgttagatctttagctcgcaatttgaattttgaaagtgccattattgcacatgaagaacatgatcagtaaaacaaagcctgggaaatatgccaaaacaccatgggtatcaagaatagaatgcgcgcccgagaacaacactcaacaaatgatccccaaccggccctcccagctatcatcctccttcttaaccttctccttcttccgcttctcagtgcgcttgcgcctcttctcctccctctctttggcatcaatctcctcccgctccttgagccgcacccccagatcaagctgccaagccttgcgctcttcctcgtccctctgacgcttccgatgcgaaagcatcctcaatcgcaagcgcacgtcctcaacattcgccctcttcacctcgccactctgccccgtcgcaatcagatgctgcttgctgttcaagtgctccacaagctgcaagttatccttgtaggtaagatcacagtccttgcagtaaaatccagcgccgaggccgcgtttgcccatccccgagcctgcgggcacaatcatcgtcttgcccaccatggacgcgacgtccaggcgctgattgcgggctgtggtatcctcgagcgagctgtagtcgactggtgcgtggtatttcttgcccagtagcttcgcttcgtagcgggctttgccttcggctttgcgctttgcttcatcgtcggcggcttttttggcgtattcttcgcggtcccaggttttgcgaaaggccgtgtccgacaccggggtgccgtaggagtttggtcctgacatctctgtggttgatgtgggtatttgttttggggagatgtagtggaggttggtgagtggcggatctttaaaagttgaaggtcggtttgaggccgatatggaatattacataagcgatcctaattgggcaggtgaggttggaacagaagtacttaagtggctcaacacacagcttgtctttgttccaagtgttccaaggctgtttattatattaagatgtcctagcataaagaaatagttattatctacaacttgtgcttattaaatacgataatatgtaggatgtaggtaagtaggaggatcttatcatcacccattcaatcatatgagactatatatacatccatggcctcttggaggctgaaaataggcagctgttttggaataatcaagtaccatttgatgattgcatcggggtaaatagctccaactagtaatcagtgtcggtggattcactttcaggcagcagttttcgacccgcatgtataagatgaacaatatcaccacgtcgaatgtacacaattgagccgcaaagaactcggaaaatatccaaaaacatggagacatcccaacacccttgttctcagcccaccagcgctaacctaatgactctcccctcggaactccatatccaaataagcacctacctttcctatccggacgccctagccctcaaacacagcaaccgtcacttctactcctcagtcttcacaggtgtacgcctgaaagttgcctggctcgtcgagcgatttaagtgtggactcgaatgccccatggagaagtgctcgttcagtactgacgagtctttttgcaatgggcgtgtacgcggcattatggaacgccgtcggtggcatcttgagtgtcgtcaggttgggaatggttgtctgcttgtcaatggccagacttgcccgccgcattcggtgcccgcttggttcaaagttagggcacaggcaaaaaggagagttgtcaaggcagtagagagctggggacatgaaggtttgttccctctttggttctatcttattcctgtctgataaagacatgagctgatattgtgttgcatagcctttgtgattggcattatggctgttctgctgaacttattgtggcattttgcccagaggtgagacattgtcttatgcttccttgcgtgtggtttgaagacatcgttaattgaactcatcagaaattggtacctcgatagcagattgagaggacattatacgactactcattgagtgatgattcaactgagttcgggtgtcaattgacgatcagccacgaattggtgtatagacgaaccatcggtcgccataagaaacaaatcgccaagcaatctagcaacacgctcacaaaagatcgctacacaaaagcgtcttcagcatcttcaataagcatgatgatgtaatggagcttcgcagaatattcgatgcggagaatcgagttagaccctgacggtaatgcatcatcaggagacacatcaggagacatattctcacagacaaagctgtggagacataatctctgaaagcaagcttcctagatggtgtgatgcgttgactacctcatcttgcggggaatcctagccctaatccggatcttatcggtgacgtcatgttgacgactacgcataatccctacatgtatataagttctctcgcctctatgttcatcaccaacaatctctactttcctccaccctttcattattcgaacataaaacgatatgtctactacaggtgccaccatcaacaccacgacgggtaaccaccccgtggacccctacaagacccagagcttagaagacccgcctctccctcagaagatcgaagagctggttaaatttatctccgatgttaaatttggcatgttgacaaccaagcagtcagagggtgactatttggcttcacgatgtatggcactagccgcaacggtatgagcagagccacagataaccacaattcaagggcaatcatgctaatccattacccaaaataggagcacggcggcgttgacctcattttccacacaaacctcttctccggcaagacaatggatcttactgtacacccaaaagagacaaatatgtccttcctcgaccctatcagcggagcctgggcctccatctccggtactgcatcagtgatcggtgatcccgaaatcgtgaagaagcactactcgcccggactcagagcatggattggcgatatgggcgatggtgtgcacgatggcggaccctcagatccccggattggcgtcattaagctcgaggctaagttagtcacgcatgttgttccccacaggggcctgcttgggcgtgcctatgaaaatattaagggtgccgtggagggtaccgttcctaatgtcaacggcattcgagagatgagtttggaggaattggccgagtgtatgtttcctttctctcctttttcatctttgaatatgtgccacggacatgctaactggtctctgtagggcgcgtgacgcatcaggaataagtgtatattactatgaaaaaggagtacgcctttttggttaggaaggtatataacgttttgaatggaaataaaaatgaatatatttgaatgcatatgcccctcccctaaacggtctttctgcttcgtattgttcactgtaaccagtctatatcgactgagatctaatctgaagacgtgggtaaaaagccgacttttataagttactcggcgctcttgctgacctcgtagcccggaggtacgcaagagcccttccgatgctcgggtacgagttccaattttgttttcagcccagccagccacattggtccgtaccgggacacggccagaacatcatcaccgtcacagactgtaagctttagtgtcaaccaaacgtgaccaaacctattcggcagcatcaccgcaccggagcacccatgtgtacggctaagcgagtgaccatctaatacaagcagaataactatccactttgcagctataaacggtgctgcggcgtctatgctgttggcgctgctgtttctggtttaatgcttcaatgaaaactgaacagtggaaatatgggactcccgttctgggcacataggatgaatctgatattcaacaggtcccttgaaggcaagataaagaggggaagcttccaagctcaggtaggatgttatattattctattactagccgtggtaatatcattcagccaggggggaaaggccagctgacatgcaaataagagactaaatattccaccagggcataagtctctcattgggtatgctcaacggcagacatacctcaagtactccgtggtctagcggagattgtgccgtagccctcttgctgatatcagaacaaacaaacattatggcatcacaccgaagaatgacggttgtgaaacaagtcggccggaaataagagacgtcgttcctgttctcatcatcacgttaccatttacagatttaattaagcgagcctatgtcgttgtttgtctcatttgtgaatagtggcagaagcctacctcccttaggataactataagaagatgaccctgcccccagaacttcttcttttctttcttcttcagctctctttgcctctggcttagatcaagtgtagtatctgttctattcagtttaatcgctgaatggtctgcattgcagaacgtcatgattattccaatatttagacctcgcgacttggcctctgtgcttgcacatgcttcgttgcacagtgtcattgggcttacactaccctcgatcgacgcgaacgccttttcatcaactgttcggcttgtccgggcgcttggagaagatctctgttcgtctttgtccagtggttccatttattcaccgccttcttgaagcctgaaaatactggctggcaatattaaccaatgtaagagttctgccgcaattgcatacccgtacaaagtagtacctagtaggtacaatgtcgggtcagtccgcaggcgtgatccctgggctgagtgacatctagctgagatagaaaatggtagatctaggattaagcaaatcctgttaattatatccataaaaattgtccaaaaaaaagatatagaaagaaacatttctttcaactcagtctttgagcaatggccatctgtataaaatacattgtcaggtatgtccatcccatattcaccccattcctgctctccagtctcaagatcctcgcaatagatagcaaaatgggctaaacagtccaaatgaacacggaccaatccacggtagtactctccatagtcattttccgggtcttcggggcggaagaaagagtcgataaagttaacataaccgaccatcccccccggtttatcgttaatctttggccatggtagcccctgttcgataacagatggctttctaggcgccgcactggccaagattgatcgtatacagcgatcatctaacaaaagtgcgtaaccaaggcgaggaatgccactagatatgcggaggccatggctttcgacccattctttatgtcgacgttggataaccgcttccgacgcgccctctaacgcggggtcttcaaagataacattccgataaccctcgcggaccatttcaacgcatttgaggtcgaatcggtgccagctgcgctcgtaaaactccaggtcagccatacaggcctcgtcgagcttttcaatagctctagtccagtcttgatcggaagtgttgagataggaggtacgatagatggcccatccccatggccaacccccactcctaccagactcgtagtataagaagtgcggtacagactcccactcgggatttgcatgctgtcgattgattcgttcgacaaaagtttcttcgggtgggaattcagatgaacgccatggtgtaggccatgactcatcgtgaaagatactgggttgacgtggattccagggcatggttccggcaatggttcttgcaatggtgttgtaagtgggtgcatttagttggccaggaacttccacggcttgaatattttgaatatcgcttagcgcctgagtagaacccgattaggaaggcggtactggaatagcggtgtcctccatgatgtattgtcaataaaatattaaaaaacgaaatagcacgacggctgcatgattcgaacatgcgcccgcgaacggaattgatttctagtcaatcgccttagaccactcggccaaaccgccatattagataggtagcccgctccaaatgtgtggtagcccgctccaaatgtgtatcatagagctgataggaattgtgtatgctacgctggctagcctgaatagttctcgctaaaaataaatactaggaactctcgtgaaacatatctccataagaaatgaaatcttagtagactattcggctcaacggagttggtttcttcctagatagctcgagggctatagtaaatctaggattaaggaaattctgttaattacgtccatgtactccgcagcagcaaaaccataaaaaagattgtcagaaattgtccaaaaaaaaggatacagcacgacggctgcatgattcgaacatgcgcctccgaagagaattgatttctagtcaatcgccttagaccactcggccaaaccgccgtaattattaatagtaacatccgaactttggctctataaaccagagataataaatgtactatcaatagtcagttgaatgcagtcagcgaaccgtacgtagtcttattataatatcatgaataccgaagaactcttattatctcactatctctggtatatcctactacccctcaatttcccacatgttggactggaaatctgtaatgtttatctacccccgaggcaatccaaggggaatttgtacaaaaaatactaccgattttggacttaaacatcttgcccaagtgctcaccctttcactcaatcagtatcagcatcatcaaagaactcatcccagctgtacgtcggcccgacacagtaagcattcccagcaaccagctggtcgctgcatttatccggacccagagaagggttcacatccaagaataaaccccaaggaatcttgctctgtatgcatatcgtagtgcaggtttcttgcagcgcttcatttgtgacaacatgccacttgccgcaacgagttgtcgtcccttcagcaacagttgagtttttagggggctcgatttgcggaatgacatagccatcagcggaaccgggtgacgttggatcataaggcggggcagtggcattcgaagcaccagactgcggcgtgaggcaaatgacatgaccatacgcgacatcactgacaatatgaagattagagcaatcgtagttgatccatggattgtatttgcgtaatgtagttccatccttgtatccgacgccttgtgccttctcgatggatgtacagctgtcctcgcctttgatggtgtagacggtctcgcattggattggcatgcacagctttgtgccgacttggatatccttgcattcgaacaagttgtcgtgtcctatgaacagggcggctgaggagactttgtacttggtagcaatcgagtcacaggtatcgccggccacggttgtgtatttgatgccagatacgcacgagtctgcaggcttgtatggatcaattgttggttgcaggggatcgggaatatcagtaggaatattgaggttgcattttgaattgatgtatttgagttgggattggaagttgatgtcgtatgcggagtagggtgttgattgcatcattcggtaacggccgacatggcatgatgagcaaagttcagcagttggcatactatccaggtctgggttgaagccattgattacgtctatgtgtattcatggttaggatcgatcaagtgcaagcgcaagtaaacgggggcgggggatgcacgcttacctccacagtatttaccactcgtggcgtccttagcacaggtctcattccaccctgcccaagtcgccccacctttcatgttgaagggagccccagtctcttcattgctaccacaattggtagtaacttggtgaaaccaagtctctatagactgcccgcaactggaactgcaaaccagatcgcttagagtgtcgttgtcaaacccttgtctccatctaggcttttggaacatataaacctcatcgtcgcagtcaattagcctagtgatggctgtttggcaaatgggggacaattgtgacaaaaactcttgctgatatgttttatcgtaaaagtagaaccccgtgaacttgcgctggccaacgatgtcttttgctttgcggaaccacccaagcaaggatgataggtatccatttctcgcgtctttcgcaaatatcgcagtctcaccgagtgggctgatagactggacaattgccttggtcacaagattgacgatccagatatcgctactctgctcgacgtagaaagccttttcttggcagttgtttgtttccaaacaatcttgggaatatgagttgaaccaactatagatgcctaggaaagtcagcaaaagcctaagttaagaccgaaaaaaagaaaacatacctgcaccaagcatatagattgattccgagttaatcatccgtaccgcccatgagcttgtacatgtcttacactcattgctgtccgggtcgttggggaatttccccagttcgaaaggctttggcattggcggagtgggttggaagtagggagactcggtctgtatcattcccataaccagattcttggcaccagaaaactggtactggtagaagacgctgtgttctgaggctgttccgtacatccaagtaggtccctggctctcaaccagaataccgcgagccacataaatgtcgacttgatcttgggtaaccttatcaaggtcatggtccgcaacccaggcccagaggttctctatataagccgaagcagattttgtgacatggagcagaagtgatgcagcgatacaatccttgttcagggatgatgcctttttggagcatttatcggattggagcttagaaccgatcgcaccgcccacgcggaagtgacaatctgtttttgttagttatctcatgcaaaaacataaatggtccgcgcagttggtattctcagtaaggaaaagactcaccccagagacctgcagagccctgtgtcgactcatgaacattccactccatgagtacggcaccagccgtgggcccagataccgtgaacatcatgttttgaatttcgagaataccggtatccccttctttgcccacttgcacagcgacgtggggattctcggcgtcttcaaatttgctgccagtcgccataatctgcggccaaacttgcccgataatgcgggagccaagaggaacatggagagtatctttaatgacataaactccgtaaggaaagtgaacaattgaagacatatttgcagcggcagagagtacactgttaagggccgctgtgtcatccgtgacaccgtcgcctttcgcaccataggccttgacatcgaaaacctggccacctcccaaatcaagatattgaggacggcggcgggcgaaaaagttagcggttcctttaacataagatttatcgctagtcagaattgatttgcggttcaaaacctgcaattgctcttgctgggcaaaatgaagtcctgtatcgtcatggtagagaccgaatccccacgaaggaacaagaacttcgtttcctccagctaggagaggctcggtgcgggtgtcggcaacaattgcatctttgacgttaaagaacccaacgttttgaagtaaaactgccgttgagttgtctgcgtatagcgatgtgcgaataccggtaggtgtgttggcgataatggcgtccaccaagatgtatgaaccgactgcctgaccagtgctttccaaacctcctgcctgatatagattagcaatgactcgtcttagatctgttgaacgggaacactcacaccaccagtcacaacaattccgctcccacatgactctatgacaacatcttgcattgtccacgcccagtcccaatggacctgaactgcggtcttgcaattcacgaaaacaagttgactggttgtaaactgttggttacccagataggcactataatccatgcataaatacatcagctttttctcattggcaatttgtgaactcgtacccgaagtttccacccacgaaggttaaattgctcatgaaaccgccacttccgttttccatgtagatgcccttgacagtcagtaaatggaatacttgaattatggaagcttacatacctgctgtgtgtttccggtcgcttgcgacatgtaaaactcgatattttcaagagttgttccttgggcaacttgccagtgaatggcacatacatacgcaccggggtctgtacgggtaatatccattttgaaattgcggacattgcgaaggaagttgtttgtgttcaagtaccttgatatggtgttagacaaattcgcacagttggggcttggtacttaccattgctcttggtcgccgacataaacgtcagaggtaatgacgcccaagccaacaaagctcgcagcagccaaaattgttggataattagtcggctaaatggtttggaatcagtggatggctcataataagagaacgaaaggttctaccatacatctcccaggaattgcgtgttgtaatactggatgatcggactgctgacgaggtatgttccaggaggaaagaataaaatagccgggaatattgtgcttgaaccacagtttgctccacatcgatttccactggagatagctttattgattgcggctttagagagtcgaacagttagttatatgctgagagtaattgacggcttctatcttaccagtgtcgtcggttacaccatcacccttggcaccatagtccttcacatttctccagacctggtaatagtaacattagctagatacaggtagaagtcagataaaggtgggttactttatatccagatggagcgaatggactggcagcattttgctgcagattggccaaccaataatcagaaccactcgcagctctctttacaagagtagaattttcggattgcaagtcagacgattgaagcacagtctgttcgtccgcaacataaccaaaaagcccatttggatgttgaagccgctggggaggtcggttggtatcgtttgtcttggacctgtacttagcatgcaccttggcagccagagcctcctcctcgccggtggaagcggtgggtcgaacagactctgctaaggctcttgctgcatcggcgagatccttaggaattgtgtaggcaaagctatcattggtgttggtgctttcttggcgtttttccttggacaattcagactcagacgcattttgaagggcggagagcctagtgacagctccccttgaataatccaagggtggtgcgtttattctttctccagtcacatcctttgcgttggccatggaatatctgttgaattttacattgtcaactcttaacttgttgacaacggccaatgctctcagagcctcggaaaccttggtggcggcatcagagttcccaaattgagaggaactcgacgcagcagcagaagaacttgatacagtgaccgagacagaggcgacattctgacgattgaagtgctggtgtaggtgttcatgagaatggtgggcatgaattgcccatataccagtgatctgacagataagcagtagccatcgtagaacaaaaatcacccccgccatcttgcaaataaaaaggcttgaaattgtcactggatttggagagttccaggcagaggaactcctagagataaagaggcgggctttattggaaattgcatcccgaaggacttacaacgtatgtcgaatggtttcgttggaaacccgagttaatctccggccaattgcttggcggttacatcgtttctgatagtgtgataaaatccctcaaaatcgaggggatattaaacgatgccaagtgaaatgggccaaactggggaatgctgtatatatattatttccaccgctttagtttccgccttcgtattatacaaattaatacggagttcattccgcatattctcgacttaggacagcggtctaacctaattaaaagagctcatggctttcctattttcaacacgagtgccatttattatggtatcgctactgtaaaaagcacagccttcgaataatttcagccacatggtagcttcattgatctaatcacctgatctattaccataaagctattcagagatcatctgatctattgagaatcacctgatttactactcttttcccgactttattcttctatgaacctactattctcaactgcctattactactccatgaatatcgctccaattaatacttcataaagtagtgtaatactcagaattaaatactctttcttatggaattcatttcatatttcgaaaaaaaaaaacggattaggtgatcgatctctgaacagcttcatattttgacagaacagatgtattaataaggtaatctctgcatagctctgttgacaaggatgattgaattaattatgcgatctctaaatagcttcattgacaatatttgtattcatcagtcaacggtatgcttatttatggtaatatcaaggaggccgaataaattatagcagtattgtattgttccattagcagcgattctaccattctgcatggcagaaatcgcattccccatctcggctgcccatagtacggccaagtgcttgagcttcagatttcttggttctgggtcgattttccgccgggatggcccgaatcctgcggttcaaccggaaaccaagccgtcttctcctgggcaggtgcctagatacagaaaagaggcttgaaaatttgtggatgcagtgctatggtatcaaccgccaagccacccggacaatcactagttaagcctcgttgtttggctcactcccattttagacccttattggatatttggacttcgtattcggtcccttcgaattttataggcaccacaagtggggttttcaaaagcggcgatgtaacaacgactctactagcagaatctactccgtactttcaagcgaatttccacttttagcacatattgcaatcgtaggattcggatactcctcgaatcggactaggtgcaatttcccggtgtctcacctcaccatgcagtagttcaaagttatacccagcaattggcttctgataagtgtataagatgctaaatcattcccactatatttttcaggagctcaagccaattagccaagatgttgggaaaacatatgctgaggttaagcatactattatgtgtcttcgcactgctagtccttggacaggattgcagtgcaagcaagccttgtgctacaggatgctggtaagtgtagccttttgggaaatggaaaaagaaacaaccacgcatattctaactgttggttgttcccgttagttcgaagtctggcttttgcggaacaactccagaacactgtggtgacggatgtctggcgaattgtgattataaacttgggtgtgatgcaaacaacccctgcgaggaaggttgctggtaataattcctgactcccggtttgattggaatgatcaatgtttaatcgataatcagtaataaattcgggttctgcggacatggccccgacttttgtggcaagaatgtctgcgttgctggatgcgaacgcaaatcggaatgtgatcccggctttggaggagaatggtcagagagcaaatcgtgtcctctgaacgtgtgttgctcagatttcgtacgcggcccaactgacctctggatgttgtgaatgactgctgactcgaatatctccagggctactgcggaacaacaaaagaatttgtaaggaataacccgcatatctcgatatttgatgtactggctaacatctcttagtgtggcaacaaaaccgtcaaacacgaaacctgctctaaagatcgctatatggacagagtcgttggctactacgaaggatggtctagccggcgtccctgccatgccttctggccagaacaaattcctctcggcgtctatagtcacgtcaacttcgctttcgccactattgatccggatacttacaaagtgacgccgtcagaccatcgggatgttgatttatatagccggttgacatctctgaaaagttacgacaaggaccttaaggtcatgatcgccataggtggctggacattcaacgaccctggccgaactgcaacagttttctctgatatagcagcctcagaagcaaagcaagacaaattcattgcttcattgatctctttcatgtctacacatgattttgatggtatagatctggactgggaataccccgaagccgacgaccgtaacggaaagccagaagactttaagaatttcccaaagttcatggctaggctgaaaaacgaactgaaaaagacccctggacgaagcgaactctccatcacgctaccggcatcctactggtatctccagcacttcgacctcaaagagcttgctaagcatgtttcatttttcaacatcatgtcatacgatctgcacggcacctgggatcaagggaataaatggacgggtgcgttcctcaacgctcatacaaacttgacagaaatcaaatctgctttggagctgctttggcgcaatgatgtgaaaggagaccaggtcgtcatgggtctcgcattctatggccgttcatacacaacccaaggctgtgtagagcctggatgtgtgtatgcctccggaggtcttccagggccatgcagcaatgaggcaggcatccttctcaacaatgaaattatggatatcatccatgacagaaagctggtgccaaagctgtacaaagaggccacggtcaaggttgtcacttgggatgatcaatgggtctctatggatgatcgagagactctagccatgaaggccaattttgctcgtcagcaatgtctcagcgggttgatggtctgggcgatcagccatgacacttcaacggcagacttttcacgtgatctagcaatggtgtcaaaccgccaagtgttgatgcaacgagccgaaattgacaccgatatcatcacagaaaggaccaaccataagcaatgccactggaccaactgtggagatagctgtcccgcaggatggcaaatgatcaaacgcgaagacgattggaagacaacgaatcctgaatacatgatagatgatacccactgcgagggacatggctcgcgctcctggtgttgtcctcctgacgccgaactcccaaagtgtggctggtataacttcaatagaggcaattgcaagcctggctgtgaggatggaatggttgagattggctcgacaacaaacggatgcaaaaaggaagatcaataccagtcggcatgttgctcagtggaagacgattatggaaatgggttgagcagcatggcagtctacaatacctgtgaatggtcgaaggagaatccccagtgtgacgatggcaagtgctctgggtcaaaaagcacaatccttggacagtccggtcaagggagcggtgatgtctactgttatgccggggacgtctggggcgatcattggccaaaaattcagcataccttacggaaatactgctgcaacacatcatctaagagcaaccgctttgagaactgcgaatggcgaaatgacgtgggtttgcattgggtcggccaaagttgcttctccggatgtgactccaatcaagtgcgcgtggcgatggacggctttaacgaaggctgctacaaatccggtgcccgagcatactgctgtgatgcagtcagttacacggagactgagcgcatgtctgatgacctgcaaaaattcaaagatgcactcattgactggacaatagctgtggaatgtacgaattattactactccgcaacaccagccaagtctctaagtattcgtgaggacgattgcgagatctttgcgtcacatatacttgttgcccacctggttgaaatcctcatgggttacgagtccaagcaaaccacccactggcagcgcttggtcaatatctggaacgatgtcgtaagtaaccagctcaagaatttgaacacccgcattatgcttccgttcgttttctcgaatacctcatttccagagctcctcgcaaacggttatcaaaccaccgccaaaaatatcctagatgttcccgattggtatgataaacgatttggaaacaaggattcggggataacatgctcgaagagcctgtgcgactatgaagatggattctgtgaccagaccgacgacgacgacgacgacgacgatatgtttacccgacgcgacctccaatggcaaaaggtttgtcaaatctccttaatgcatagatccaactaattttgaataggacaatggacctgtcctacagaagcgtgccagctccaagccgatggacttcatatgtattggtaaagccggcgtggaaagagttttggcgttcacccgatttgcttatcctggcccaaaggattggttacaactcaaggccaaaaagccagatccaaaaaaacaggtaacggtcaatgaagccgtcgactacaatgatgacaaggattgcggggacactgctatacaagaacgacaagcgacgactgcggagctcgaccctccaaaaggaaaaaaatctaggttcaacagtgagtgttcctggcgaacgaaaccttggtaaatcactagctaataatgatctagcggatcatctcctcgagatcaagttgattcccaagtttatgctatgggctattggggcggggaactgtcctgttgattgcgacttcttcatcgattacttcggcgaagatatcatccccaagactgcagaaaaaacaccaggaaacaatcttatcctccaaaagcctattgcgcgagtaatggagcaacttggaagcaaaaccaacttcgatgtgttccggttgatggactcagctttgaacgcagtaaaaggcgacgtaggtctctggtattttcaaccgaagaatagtgctgacttctttcgcctagctctggagttttgatcgcccacaaaacaccgcatttgatgatgccacatggctgccacttgtcgactctgatgacagctctaaagctttaaccttgctacgaagcgtaagctggcctgtatatctttgattccccggcttatttttccctgctgacctgttaccggctcgctgcaggtcttttccgtctataattatcaaaattcagaaaattttcagaaacgattcaatattgtctacaagaagattcgtggcgagttagatttggctgcaacagaatacttcaaactttctggaaaggcagttgaccttggggagtgctgggatcgctttttcaaaatccagaaggacttgatggtgagctttggaaggaaatttgttgagaaaggaatcgaagagttagctactcggtgggctaatgattcggacaaggagaaagctgaggtggttaaccaggtgctgaaacagttgagggagaagatggggcagatctatatgaatgatttcaaagcagagtatcaaccatcatggaagtgattttgcctgctcgtccaagctggtcggtatcgtcagcctgagcgtcaaatgctattgggtttagacatatgtgccaccagcgtttactttctttcacatatcggactatcccatctaacaattttatcgtgaattaagaagtctagggcattcctcattcacttgccaacctctcctagtctctagtaaaactctccgatcaaaatgattatcccattcgacggtttgtggcattatttacacccatgtgttacagcttatgaagaagatcgcacctaattcatccatgccatcaaaaaggcgtataagtggacggaaaaataccctttgacacacatcaacgccatttcttacatgtctcttagttttgcttgccgaagggggccaaggattggtgaacacggatggacaactgaaggtataaatagagctcgaaccctctaatccactctgcgcgcagctcctcagaatccctccacttgccatccatgcgattcccacccagcagccatactcggtgcaggaggtctacgtccagcccaaccatattgtcggggcaccgttaagtcttctattcgttgctatttacgaccgaccgccaagaccaggggaacatgatatccctctcaacgccagtggttttcttgaaatcactaagatgctattctgatatgctctattttgctattgggctcactacccatcttctctagatacttcttcgattttctgtgtatcgttaattggaatatttctacaaagaactgtacctctattgacctaaaatctattccatctattagggatctagtacgcatattatccttaatggtccgagctattatcacgttgagcttctcgaggtcgaagtagttcgtgaattggtttttttttgtctattgtgtgccaatagtgttttatagtacgaaaagtggatgtaatttaatagatacgtaattatctactactccgtagctaggaaataattggagcttttaaacgagagacctaattagtatgtccatacggagtactctgtttcttcgtgcgtgtaaaacatgcacgtaatcagtgtgctttgtagtggctaaggtggccgctcactatatcaataatggcggtttggccgagtggtctaaggcgattgactagaaatcaattccgttcgcgggcgcatgttcgaatcatgcagccgtcgtgctatttcgttttttaatattttattgacaatacatcatggaggacaccgctattccagtaccgccttcctaatcgggttctactcaggcgctaagcgatattcaaaatattcaagccgtggaagttcctggccaactaaatgcacccacttacaacaccattgcaagaaccattgccggaaccatgccctggaatccacgtcaacccagtatctttcacgatgagtcatggcctacaccatggcgttcatctgaattcccacccgaagaaacttttgtcgaacgaatcaatcgacagcatgcaaatcccgagtgggagtctgtaccgcacttcttatactacgagtctggtaggagtgggggttggccatggggatgggccatctatcgtacctcctatctcaacacttccgatcaagactggactagagctattgaaaagctcgacgaggcctgtatggctgacctggagttttacgagcgcagctggcaccgattcgacctcaaatgcgttgaaatggtccgcgagggttatcggaatgttatctttgaagaccccgcgttagagggcgcgtcggaagcggttatccaacgtcgacataaagaatgggtcgaaagccatggcctccgcatatctagtggcattcctcgccttggttacgcacttttgttagatgatcgctgtatacgatcaatcttggccagtgcggcgcctagaaagccatctgttatcgaacaggggctaccatggccaaagattaacgataaaccgggggggatggtcggttatgttaactttatcgactctttcttccgccccgaagacccggaaaatgactatggagagtactaccgtggattggtccgtgttcatttggactgtttagcccattttgctatctattgcgaggatcttgagactggagagcaggaatggggtgaatatgggatggacatacctgacaatgtattttatacagatggccattgctcaaagactgagttgaaagaaatgtttctttcttccccagatagaaacgttgacagaactgcgagtgtgactgagctcgagtatatcgagcgccaggatatggagaacttagcattgagtaatgtgccgggttctacctaacactggaatgacaccaataccaacggcttttttaatccctagataatccaacagttatcctctttcaaaaggtctttttggtcttttctaggatatgttagaacatgaccactaactacctccgaatattattagtagggaacctttgatacaagctatttctagacctttaagagactgcatacatatttgtataaatattgattcatggcagctgattaacctcccggcgaaaaacccggtgggcgcgatggacccaaaaacctccgtaaagagcaaactatgacaaatcagaataacatcctagtgatttcaagagaatcattggcgttgagaacgatatcgtgttcccctggtcctgggggtcgatcgtaaatagcaacgaatggaagacttgacggggccccgacaacgttgttggactgaacgtagacctcctgcaccgagtatggctgctgggtgggaatcgcccggatagcaagtgtaaggggggctagttgacatttttcaaaggtgacttcagtcaaccccatcgagataataataacaatgcgcactagaccccggggaatgataagccatctcttagcgtcttcgcgaagccgagggagggatttagaaacgcccattggggcagcgatctggtggtaagaacgcatggcctccctgtttacctataccggcggtagacttataggtagctgttccagtctagactatctctaaccacctgagtcccattgcaataagcttcctgtcggttgctcgaccgaattggtttgtgactgcgtcatggcgttctgataggaccactttgatcagccctttcgtcccctcctatcgaaaacgatattcaatacaccctagactagtcggatgctcttcgttgagatttttaattgctcgtgccgatagaatgaggacgacgataaactcattgccatctcccttctcttatagagaattcagtaactgctcagcttcgagccgtaggcctttgaagcctcggaaagtgtgtacaatagggtccgcgggaagggcggacataagggaagtgaaagatatgcccttctcttgtcttcatatatctgaggctggggcagaatcaacgtgagccatggtgattcggccaaccttggtgccttccataggacgtgattggagactttctgaagtttgatgacccgggccataaagaagttaatttacaatttatgagcaactgatcggccaaataaagctacaagtgaactactcaggcacttgaattaaacaaaaagtaaaagtgaactcaattgaaagagaaaattgggtatcgttcgcaaactcccgctaccatccgctaattcatgaagcggcgtcaaaaattgacgccgaagtgagcgaagattcaaatctgatggctttgtcagcataagaacataaacagaaggtttatagactcaccaatgcaagaggaatgcggtgaggaacccgaccattgtgcaacagcatagccacggccttctggggagtagcctgtagcttgcggtaggcctcccgaacgtgccgtggctcaatgggagtgcgcccctcctcgggcgggtcgaacaggccagtctcgcgcttccgcttcttgaggttctcaccggcctcggcgcccccgcgacggtgcttctcgttgtcttcgcgctccttgactttgagcgcctcctcagtcagggtctggacgatctcgaatgtgagaaatccgaggatgtccacaatgtcgtcgttcggcttggattcggtcacgatgccgaatcctgcccattcgcggaatcgcttactcttgcggtaggtaaaggaagcctggcggcactcggaccagaatacatactcttcccttgtcatgtggcgggtgcgttcatcggcggcggcaagacgctggagtgtcgcgtagttctgctcctcctcttcttcatcttcttcatcttcacgttcgggaacctgaaccgagtagaaactgttgacatcccacgcaagtccgaccttggcgcgcttattcttgggcttgggggcgacgtcttgggggcctgcaacaacaccagccgcatcgtcggcggcagcgaagtcggcggcgtcaccaccacccttgtcgtcggagtccttgacatttttgcggacgtccttccaggacaggaaggttcgcagacgggagactttagccctatcgtggcggatcaggaaaatcaggtcgtcggtagagatcgagcgaactccgcggcgggttgccaatgcagtgctgcgggtaagcttacttggtcattagtgacaagctttctagtttgaaattcccgatactcacgatttcgatcacctgttgacgcgtgatctcttcaattaaagtggtagtctcctgagccggctctgctgtttctccggagacaaacatcatctcaacatcgtcgttagtaaaggatttcccaaagttgtcttcgtccatctcatgatcttcctggctctcggtaattatttcggggctagttgcggcattgtcgattcgggaactgaacgaggtcaagatgcggctggaaatcgagagaagccgaatgctagacagcccttcctcagaaggaccacgcagcagcttggcaccgaagacgtcttcaacagaatgcatggaaatatcgtcgcggaaatccaagcccgagtctaaagctgcacaaggagcattgacgggggagtaaaccgtacaatcactcatggtaacatcgagatcatccatggtcccatcagaaacactcatggtcacatcagggtcagtcaaggccccatcaatatcactcgaggtcccatcataatcactcaaggacatattggaatcactcgaggccatgtcagaatcactcgaggtcccatcagaatcacttgaggccatatcaggatcagtcaaggtccgatcagaatcactcgaattagaatcactcgagatcccatcagaatcactccagatcccatcatgatcactaagttcttcgtcgctcgaaggatcttcccggctctgtgcccagagcgcattgattgatccgacatccaggttgggagaagacatgattggggaatcagaaaggatgaaatgtcaaaggatgcgtgagacgcgtttgttggtgggtttgacaaagtgtttagaagacaaaaccctcgaaagaggacgcaaggcagtagataatacgccgaaaatacaacgctgcaggggggcttctcttggtaaacgaagcgtatgaaccgtagatagaaaatatgaggagtgacagctggcggggaatggtgaacgagaataagcgagacaggcaagtcggtaagccgataggcagagtagcagccctcacaaggtcacaaggtcggtatcgataaacagctcttgcttgtgctcgtgctcgtaaaccccacaactccgtggatatatgagagaaggcacgaccatcctgccaattatcctaggcctaggaaccttgagatcgatcttggttttcaacacagtatccttcagcgatctaacgtcaaagcttcgaaattggcagtaccagtttcaaaggaccagacatctcgagtgttgaagttctgtttctcgacgtcaagatgtgcgtatttcaacaacccaacaatgtaagtctgaaaggcccagctagaccatgacaggacatcaaacgggtttttagatccaatattgaccctcgctattgatcggagaggacaagaatgagatgtcgttattccagcaaatgagtacattcgcaaaccagtgatatgttgcaagtccagccggaccgtctgtagacatcatgattgccaacctgaaaggcaggttcgaacttcgcaggacttcttcctatcggactcggggaatcgaggtggccccggccctatcctcagagactatgtgtttgcgccacgcaagtatgctatgtcgcaaaggcagtcgacagtcacaatatgtttagaggccttcgaagcctgatcgggcaataagatcgatatattcgagagccagaaagatcgggagatggaaaaacctcagcaagatgaaccagatatcagggactcacctgttgtatctcctgccgatacttcgggtttcgatcggagctcatgatgggtggtggtaaccctaccaaagagaatttcttcgattatcaagatgagggttacactagtattctagcgtgagtgaatgttcttcgattgattgaagacaagtgagagatgaagaggagatgaagctctggacgttcacacaagcacagggcgatctggggacgataagcgataaccggatgttctttgatccggcatcttttatccggcggtggcggagtattctgccggcatgcggggcacggctgtttttttacctaactgcttgttatacagtgagattcattgtattctgctcaattgcatagcctgagatcttattgtcaggatgctctatctagttggactcggcctcgccgatgagacggatatcaccgtccgcggtctagagatcgtcaagcgggccgagagagtctatctagaggcttacacgagtattcttcttgtcgataaggaaaaattggtgagttgagctccaagtctttactttgaatcccatatgccaatgagtcaatctatatctttcgcgcagatggactgattaaacataataccagtaggaagcgtttcatggccgttccgtcatcgaggcagaccgtgaactagtcgagactggcagtaatgacatcctcgccggcggcgacaaagccgatattgtgttcctggtagtgggagacccattcgggtacggtcttgatacatctcccctacaagatctctagctaaaacataccaccaacagcgcaacaacgcatactgaccttgtcctccgcgcgcgcgaacttggaatcgagaccagagtcgtcccgaacgcctccatcatgtccggaattggctgcacggggctccagctgtacaacttcggacaaacagtcagcatggttttcttcaccgagacctggaagccgtcatcgtactacgatcgtgtgcgcgagaacgtgcagaccggcctacacacactagtcctgctcgatattaaagtcaaggagcagtcactggagaatatggcgcgcggacgccgcattttcgagcccccgcgctacatgactgttgcacaatgtgcggcacaaatgttggagacggaggaggagcggaaggagggtgtctatgggccggatagtttggctgttggtgcggcgcgtgttggtgctgctaatcagaagcttgtttctggtacgcttaaggaattgtctactgttgagatgggcgcgccgttgcacagtcttgttcttcttggtcggaggacgcacgatcttgagagggactatattcgcgaatatgcggtcaataaggagacttttgatgcgagctatgtcaagggatatggggctagcttgtaagttacttctgtggagatatgagaatattaaaatacatgataagatccttttaaaatgtggactgatttacttgatataatacaccgaggttgttgaaggacaaaggttggaaagattgtatatggtatattggccttcattcaatttgatcctgcgaggaccagccgaccagagcagtgtctggatttttctattttaaaataggaagacaaatgaaaatgccgcaatataacgaaagatgcaaagcaaatggtatccaagaaacaaaaacgaaaaacagatgcgaggcataatatcaaaaagaccccaaccgacaccttatatgcaaaatgttgaagcaatgtacaactcaactctcgagaaaaaagacaggcttatatcgtatcacatcagatgtcttcttcctcaccaggaagaagaatctcatgtccagaaccttcatatacaaagatagccgcaagacagccaaacacggatactaaggcaatcatccaccaggcgaagccgatcatgccaatatccagaccatatccgtaccacgcgcctgaaaatataggtccaatggtacggaaggctgacgatacggactggccaattccgtgaattgtgccgaggacggatgggtgtggcgagcaattattcaacaggataatagaggtgggaagagtaaaggttcgggcagtgacctggaagaagaggacgatgatgatccagaaccagacccaggggccgttggcttggccaggagggggagttgtagacggagccagtgagatatagggagcaatgaagtatgcgatcgggaagagggcgaggaaatactggtagctcttggctgctcccagacggccattgatagtaggatatatggtgaattggaggaccataccaattacacccaaaatggcggtcgcaaagccaacgctctgcggcagcatgcccagtccgccggtgaaggcgaatggcaagctccgtgcggggctcgcggggtcattggaatcatagcggggggtagataagaagagtagccagaggttgttgaaggcacccatctggaagtcgaagaaagcctgtgcgcccagtgtgcacaacacgttcttggtccagattcttcggaaaggcagggcacgttggagacgggcaggcttgtgcgctttttcttcgagctcgtagctttctgagcgatccgtgggccggtctagcaaaggcccgtcctcttcgtagtcgccgtgcggaagccttgtgtataaggatgatgaagaggggaccactctcctcacgccgcgcgcaaacatcttcttcgcaaatgcacccaggccaggcttgcccttgcaagatgccaaggtctcttctaatccatacgcaaccaaagctgcagttgaagagaggaaacagaagtttgcgaacattggcagggcgtacgggtacgtctcgagccattgcactccgttcgcacctccaaaggaagaattgggcccaaaaagacgagggtagctcttaacgggatcagccaacatgccacccatcactgcgaaactggttagcaaattgtcgcatggccgcgaacagcattgacagaatgaggtactcaccaggaccaaataacgaagctatgttgaacccaataggcaaaatcaagaaagcgcgtgagtgatatttcttctccttgacattctccgcgatcatagttcgaatgataccaacggtgccgttgatgccgccaccaaacgagcgccagaacacggcctgcgcgaacgacgtcgaataggcgacacccaaacaagacatagcagtgccaatcagaccaacaagcagaacaaactttcggccgccccactcagcatcggcaacacgaccccaagggatcgccgtcgcaaactgagcagcggtaaaagcaccctggagaattcccgcctgggtcgcaacatccgagtcggagaggttcgggtcaaaggacttgagctgatagaacatataggcctgcagcgaagcgatctgcaagaagtcaaagacacggcagagccccaacaacgccaattgaccctttcgcggcagcgacatccatgttacgagcgcagggcgcgctggcgcggacacagtcgggagctcattctcctgcacggtcagtacctgtggcaggccatggctgatagagcggccgcgcacatgctgtgcttttcgatcaccatttaaatccatcgaggtattccttagcatgttatcatcgaagacgggcgagtcgagcgagtcgtgggaggaatattcttcaacgctggcgagggaggtattggactcgcgtcggcggcggcctgtggtgttttcgggttccccggtgccctgggtgaaatggaagccactcgaccaggatgtcgtacgcgcgtggcgggcattattcgttttatgatttccagtcctagtcattgaggaatgcactagtgtaaagcgcggcgccgtaacgatcaaaggcctcggttccacgtatttttcgtggtttgggttccgtagttgttgatattaattatgattggctatgatagagagaatggaaagaagagaaaactggaagacttgtatttttttattttacttcgatttctcctatgttattgcgatgacgttttttctcggttcctaattgaggcccaccagccggagaatgccgttacaactttgtacacaataaagaactttatttttatattgaacataacatttaaatcaaatcccttaatataaaatccataagttgtatgatagatcgacaacgacgggcttgcgacgaccgctccacacctccctgccgattgacgacggaagtcttggcgttaaggaggagaacgttttgaacagttagttgctttacagtactttacaatacatcaatacaaaaaaacaattaataaccgtggtcctaccgcggttctaccatggtacaggatagagttcaagcgtatcagccacatccacgtttgtggagccgctttgatacaccacgtacaggtgatacaaatgtatacttcagtcctgccacagcatacttaaccctacaaggcgaagctaggagttgataacctatatacattgtatcccacgccacatacatgtatgtactagccaaattaacaatcctaacaaggtcgtattgtatctctacaaagcagtcgtattcggatcaatgcccagcgcgaaaccaactccgcctccctccggaggtatacgtatacccaggtgcgtagtatgtaactacaataaatgaattagtcatcccgccttcttccaaccttggttgaagtcccgatctcgggaggggcgcagggaagtgccacgcccgctcggtgactccatccttgtggataactcacggacattgcgaagtcttgatgcttggactccttctatagctccgtatactgtttcaagcgatattcaattcagtgtatgctttatcagtgcatcactcgttcctctcattcgttttactaaaaaaaggactcgacacataaaacggccgttctacaggcgtctcatcatgatcactctctccactcctcttggggcccaaaagcgactgcattcgcgcccgaaacatctcattctgagccaacttaccaacaggttttactatatcccattccctatccataaaccttgcatcgggctccccttcatacgtcgactccggaccatctatccacgtcgttccctcctgaaaacacgcgtctttcatttcctccgaactcctattgatcatactcttccagaatcccccttccccagaagaaacaacaccagcatgctcaagcatttcaacagtgccagcgacccagtcttggcaattcccaaccccgaactcggggatatttgactcgtcgttcccaaattccgagagcaggctagcagcttgttggctctgctcagaagagagggaagcaaactcgtagcgacctttcaaaatcgggtcttccagtggctgtgtccgcggatcgtagatgaagtcttcgtcggtggggttgcgtatatggtgcatttcgcaggtggaggagccgtgcttgtagatggcgattcccatgtgggaggggccatcgctgagtttggcgtcgccgcggccgtagatgtttgctgaaaggccgtacatggaggataccatgattaacactggtagagtaaagggagtatgtagttgtcacatgtagttaaatgtccccttccccacaccgctccagatctacatccgcccgagagatcggcggtagttaggcaactccgatttattggtgataagagcctcatggcgtgccccggcgcgtattcaggtgtcaaagctgaaagaaatggaaatataaatagatatccttcgtacgctggttccattggtttagcatggacacctgggcatcaatattgaagtgactaggccccatggggccccgcacggctcaaaacatcaacaagctcgatatcactttctcccaagcaagaatacagtaaccattcgattctatatacggcatttaggtctttgatagacctacagtcgaaatttctgatgccaatttgaatgacagcctttcatcctccttttagtatgcctcatattgacaatgtttgtttcattggagaaaacaacttcgctggctagtcggtttcaggatgctcttccttcgattttgaaaaagtcccgccatactgagatatggggtgttgatttgaagcacgcggaatggcaggtgctggaggtggtcttagaaaaggtactctgattatgggcgcactagcacaccgagatttgtcactaaatcataaatagttcctcagatgccattccgcaatccttgcacttcaactctctagagcaagtgcctcactcgagaagactttagaatggagaagcctctctgacccgagagctctccttactgaagcagagactatccttcctgacttggatctatgccatattactttgaatgagggtcaatatgtgctgtggattaatattgacgagatggcgattaagagatactcaataatacacgcaagcctgacgacatctggattcttggtgcagttgggtcttgctgtaatgcaaaagctctccgtgcttctgatgcatgcagccgctagttctgatctacatgactattcggcttcctgtgtggttgaatttaagatacatgccattcaaaacaccaagagaggacagcagtccttccaggggaagatcagcaatgccattgaggaattggtgacattcattcggtgtcactatcctaagattctgggaaaggcatacatcatcaaacctcgtgatgaataccttgcaactcttgatatcaatgaatctctattgagagatacggtacttttggaaaatccagaggaccttgctcgatatcttggctcacaactcccacctcgatatggcggtactggggaatcgctcgcggaatgtgacattcttcctagttgcagccttgcggaggatccaacagggaacaacgacctcaagacaccagataccagtgcggcagccagtactgacatggagaagaccggcgtgaaagaagaaactacagcttccgctatgaataccggcagcacttctccccatggcttgaaaatagaggagcaaaaacctcgcttaatttactccgacatcattgaaccgccatctatcatactcgaccccgaagacttgcccaaagcaaccaacctttgtcccgacaaaatgggcgcgcgtgttcttttcgcagattcagacacagttgcgaaattcagccatggtgtccgcctagctgaagccgaagcgttacacctagcatctacccgcacgaccatagcaacaccaaagcttctcagtgcatatatcctcgatggcgtcggatacataataatgtcatatgaagtgggcgaaccactcaacaaatactgggaccgtgttccgaaaaccgagcaagatcgcgtcctagagcagttacgggactgcgtgaaccagatgcgggagattcccggcgatttcatcggtggggttgacggatcaccttgtcgggatggcgtcttcgaggccggctacggcgactacactagctacagccacggcccgtacccatccgaggaaagctttgacgagggaatgattcaagctttgcgagatcgtatgccctttaaagtgctccagggtgaacatgacgtcgaatcgagctttttcaacagcgagtacatgctgtatcagacggtccgaggtatcaaaaatcacaagatcgtgtttacgcatggggacttgcatgccgggaatatacttgttcgggctgatggcactgttgttctattagactggggcctggctggtttctggccggagtattgggagttctaccgtgtcatccatcattcaccctggagaccctcgtgggatcgtatggtggagatattcatcccacctttttatgttgagtatagcgtcatgaagaggatattcgcgaccgcgtggaactaatgcagggaatagtccgctgctttttgagaattacatgaatataatactccgtacagaattattattgtaaaaatattaaattgaattaatatcaagaagtttctgccgagcgaacaccggcgcgaaaaaagccacttcgatacatcgccatacatcacgtacgatacaaacgtatacgcggccttccacctgcatactttaatcgatatagaggtggaatatataattctcatactacataagcctatagaagtagtcatatcgtgcttgtgctatatctgcaccagctaggctaaccacaaatacaacgaggtcgtattattcacaaagcaatcaatacgaaggaagaatacccatcgcgaaagtaagcagctccgcctcgatccggaggtacgtatgcccaatgcgtatgtacaataggtgcggatttttcggatacacgaattatattactcggtggaaacgtctacgggcccatcatagacttctagatctatatcatagatacacgatgtaacaggatttttttcctatttgggtggctgatacgagatataatgcgtatagcgatcagtctatggatatatgttatggtagtatgtatgtacagcgccgagtaactagctagcatctagaacgcaaaaaagaagcaagaaataaagatacaagaacgaggagtcactattcgatccgctctcgttcacgcctatggccgtatagactccgctcaacgagcgggaaataggaagttgtttcgtcctctccgacccatcgacgccaattccaccagcggaggtcggtggcttgcacaggcgggtgtttccgctcagccgtaccgtccacaggcgtagacgattcctgatcccgcagctgggtgagcgaatgtctggtataatatcgatgtgcgaggaagattccggcgaagagggggatcgccacgaggagaacggcaccccaggcaagtaggcctgtgaaaatgtcagttttgcttgtcttcctggaagaatagaaagcatgttcaggatatacttacggccattcctccaccggtctgagtactttggagttccagccgggcctgcatagcccgatggatgtgtataaatattggagcccgggttgttagggtcaatccatggcacggtattgacacctactggcggaatgaaaggacgagctgcctcttcgccggggaacccataccccggtgcgtccaagcaggtagattcggcgcaaaattcgcgcagctcggacgagggcacgaaggtatacttggtttcggactttccgagcaaaatgccctcgcgatccactgcctcgaccttagaccagaggtagaacttgggggtggagtatttggtctcgaagccggttttggaaacctcgtccagcaaggtccaaggtccagtggcgttcatcgctccccaaaatcgccaggtctggacgcgggttgcgccgttccaactaacatagaagctggtggtcgatgatgtctccgcgcttcgggagtatgtccatagggcaggagagtctgtcggtgcaccgtcccattcaaacttcattgcgcggtagttcatcacggtgtctttggcgaaagagccccagaacagtagattgcccgcctcgtcgtgctcggatacaaatgggttgtttccccatccgatgaacgcgttttggttggggagcatctgtaggtttccctggctggagctcactagatcgtctcggattggagcgtagtcgcggagctgggtagccgttttttccacgtggtcaatcatgatgatcatgcccgctgaataggtatgtgtcttgttgaagccgttgtagccattgttgtagagtgagagcagtgtatgcgtagcattctcatacaaccaccgggcgtcatgttgctgcgaaaagctaaaattgatattccggaaagagggctgcgcgccgtgaagccgccacatcaccgagccgtccttaccggaaaccttgtagatggccgaagtatgccgcgacgaaattaaatagtcgccggccgcatttttgtcgacagagttgatatggaagtaatcccacggttcatgcacattcaatcccgtcccagaagtatccgtatgagccggccatgtatagctcgaggatggatcgacatggtcgagagaccgccattcaaacagcacgtcgttggtctccacgtcgatctcctggaaaacactctccatgagccatcctacaccagttttgacgttccacggtgtcatgtcgaattgccgttgttggtaaatggtcatgagagcggtcttgccgtcattgatgggacggaattcgtgcatgtcgctcgaggccattcctccgcccggctgaactgatcgcacaacccggtagttgttatccatgatgattccatgtccgcggcagtatcccttttgctggttgccctggaagaaacataggtggtcggcgcctttatacttgcacacgtggagtccatgggcgtttcccggccctgaaatcccccaaccactccatactaattcctatgatcgattgatgggttagcttctccatgatggacgaatctgaaccccaagaacaaagacctacccctgtgttatcgtagatgtatgggccggggttttgaagttcatatggtgtgataaagatgtagcccgggctgagcttgtctggattggtcctctcgatattgaagacgggcgggtatatgtcgggtctctgttgtaccgatattagagagcaagcacactcgggtcaagctaatttcactaaccgatttgtaaaaagaggtatcctctcccagtgtacagtcaatcgcgcataaccagagaatgccaagaaagaatagcgacggcgcagtccctaaagaggaaaatagggaggtgcccatggatccttcgcaccacttcccgatgcaagatagaaacactgaagaatatcacccaaaaaaatatctgtaagggaggttatactgaaagcaaatcatttagaagcatagaagaatattccacccaggccaagaggcccaaggtgaacgaacagtgtgtacgaatccctctccacctgtcaatgcatgcttttcgcatatctagtggggcctaagttgtgttgatcgtcgacgttcattggtcaattgtcatttaaagctagacaaagatgcttagtcagcggcaatccggccatcgctgcccagtcaaagttgtctcagttgctgaagttgcgggggaagtctatacgagcggaatcaaggttaacaatccgctctgtgaacaggatattctccctcaaaaggcttgattgtctaactcggttgttgttttctttcccaaatacgtgtaacttagatagtgtgacggtacggtatctctcaggagccgcgtcatgggcgatgtggcagccgctaagcagcccctaataccataactccgagatcgtatctattccgtaagctgaatgtccgagagcaattataattcacgggtccgtcaaaggttcgtgaagaaccatgtaacgtgtctcggagatacgcagtcacccgccagccacactcagacagacagctcaatccggagacgagttaacctgttcgggagatgcaaccaatggatcgggcttctacgattccaggcgctccgatcgagctaaaagctaaaagccacgtgcatgtggcattatttgttgcgtacgccggtagattgaaagtgggggattggttcagggacggcggtggcgcatggtgcgtcgtcagagcatacgcgggctgttgttgcagcatctattctggtccgtacggcgtacacgtgcattggatttggacctacagtttggccttgtgcataatttagtgtccgtaattggaggtagacatcggacgatatggatactgtcgtaccagacaccatatgttgattgatttacgagcccgtgtgtgagattctccagggacatcttattttgcacgaagtagatcattcaacattaagagctacagcggatagataagacattagatgaaaagggatcttatactcctttcggcgtacccaccagagctaagaggacctatcaggtgtccacgaccacagctaagatacagacctttctttctctcatatgctgtgccaaacagggttcaaatccaagaacaccagtccaagcccgaatagtagtctcaaatatccaggcccggacgaactcctcaatcccaaaataacgagcaacgaacccatcagccactaagtccacgtataccactccgtctatattacgtacatccgtcaaagcttttaattcaagccttctaggggatccactccggcgcctagaatgaaagaagcaatctaagccccgcttgtttcgtatcgaatagagagaagcagttccacgttgtatcagatgattgtttcccttacaaggatataacaggagataacaatacgtgtaactttcaatgtttggaacgcaggttcacgtaattaatacccctttcgcccactgccaagccgctaaccagggaaactccacggcacttctccaataaggtgtggctggtacatttcctctggtttcgtacgagtacgaggtggaaggcttggggctgagtgtcgatggttgggtgtttatttatttgaagcggttgctatgtgtacatgcaagattgtcgttatgagcatacttctattctcaaggtttattgtatgtagcgaaacgtcaaagtattgattcgtatatatttcgcacgcttttgtcggtttgactttaataacaattcaatggcgccttgcatcgaccgattcatgaaaagtaaggcttcacgtagccaaaactctaggagccccttgcctctaggcaatgcatgatgataacagagcctcggggaagcgggtacttggtgtttatccctcgatttgaaagcgggggtgctatgatgcgcttgtacagagtatgcataagaaatgatggtagaaatagaaatatatactgttacattaccggattgttctccaaaacgcccctgtaaatggcaaaacaagagatcagagatgatagatgcatggtctgttccaacaagaaggatgacagagaaaaaaaaagccacggggtctgacgtactagcggcgcctgcgcgcactagcagccagcagagaaagtgagacgtggggaatatgagaaaaagaaaaaagatgcaagacaagaattttagcgaggggagaaacgcttgaaagccaaagtagcagcaaggccagcggcaagcagcgaaccaccaacagtgacggcctggagggcaacgttcatcatctggtgacggttgcgggtgctgcagcgcttgtagaagtcggccatgtcgttgccgcgggggaagggggtgtcaggaacctcctcctcgaggaactcgcagagcggggcccagccgtcgttgatgttgtattcgagcagacgctcggggggaaccaggctgcggacctgggcaacgtgatcctcgtagacttgcttgcccttgcccgggaagtcaccgcggaagaatgtctcaaagaacttgttcagcatagggtagtacatgccagcggcccagctgaagttcgacacgaacttgtgctctgggtctgagacacgccagaagacagtcttcatgacggagctgtggtttgttagtatcttgttcttagatcagaaacacagtgtataaaatgtgacttacgcatgccatgggtccacgtcacgggtagtcagaatgaccttcgcattgggataggcctcgatcagctccttcgcaaaggcacaggcaggccagtcacagacggcttggcagtcacccaggagctggtcccattctttgcggccgaactcgccgactccgtcgtacttcgcgttcagggcatcgtgccacatcaagcagtccggcgggttctcaacacttgcgcacatcatgtggtagcacttgccatagcccaggcgctcaaaagccttgcggagagctgtgaaataataattagtttgtatgttctgttcccatcggacccggtatatacactaatatacaccaagtccaacgcaacacagcacctcatacttacaggcagttccggtacggccaacacccagagccaggaccttcataggcacagtgcggtggcatttccggcggttaatgtttgtatcattggtgaagacgtcggtaatgggctggggagccagattatcggagagcatgagagacatggtgggtgtttatcagctcaatcgcaattcgatatagtttggaagtgtatagagacagaataagtagatgatataaacgaaagaagtaataaagccggacaaagaagggacaatatgtatggaaaaagtctagaaggaaggggggttataagagattgatatggagataaggggaagagtagaataaattaaaaaacaaaaattaaaaaaaagatcctaaaaaaagaatccagactccggaacaactgatcctcagggagatcgaatagaacaatgaagtgtactccgtagtgggcattcggcagtggcagtgccaatgacgaggctcaaaccatagtccctaagtacgatgtgtgtatgcctccccgcgagtggcaacgttcctatccgctatgtccgagtcttggctttgggtccttcattcctgatatccgattgtgccccgtttggaccggtggattccataaaaccaaagggcccacgagggtctacaaggtatgttgtacattgaaagtcattgtatgttgtattgcactgaggcgcgtatacaacatagacacgacgtcacaggctgacgcacagggatgtcacggatagtcaggggtgttttgtggagtcgtgtatggtattgtatgtattgtacagttcgtatggtaaaagtccgagtgcaaaaaaggccagggttttggtaaaatgaaaattaccaaaagaattgttccttcctgttgccaagactcatccacgtacgcttcgaaatccggaatattctttgatcagtcacgtcgctcggcaaaatcgacgatccatagtgccggttggtggagcactaaatgggaacgcgtacaccctcaacttcggcgagtgcggatttctgaatgaggccgtgaaggttcgaatgcaccacatacattgtaggctcatagatcatcgtagactcatctactatgtatgtataagcctgcaatgttgagttgctagttgtcatatcatacccagcacaccacagtggcagtgacccgaattgtgtctgccaagcttggcccacaatatcccaagcaagtcaatctctcagctgtcccgcccaggggaatatcgttccgagtacgagaacctggcacccccgctccatcgggttggttgcattgtattcggctcattcgagactgcagttgtgcgtttcacatgtcaagcgtaagtgaaagtttcaagtcgtctcctggatcgtccggtcactttgcctatcacggaaaagaccatctgctcgatgtgtcgccgtcccaaagctgttatctcccaagtaccgatcaggcaagttgccttggggtgttgaaaacaaagttccacccgattttcattgccagggataattgtccggtgtgtacggagtattgtgtgaggattcccggttctgttgtcacgcatcagtactgtcatagcggccgaactgatcgtcccgtgttgttgaggtattttccactcggggaaggtatcccctcgtggaccctggctttgtcgtgtgcccaacaaaattgagcagatgtctgtgaggcagttaagatgatatcatagtcagcctatgatggagagtgatagtgatagtgatgttccagagaaaccatcgtcatatacataatgcctataacatgcatgctaaaggcagattatggtagattctttgcggccagttgaagtaaaaacgcagaaagggaaaagaccctttcgaaagggtcaacagcgagagagcttcttaaatgtgctatgccaagacccttagactcacgctcgcaatcgaagctataatcacatcaccaagccacgaccgattgggaagcccctccacacagattacaatctaatctaagcttaaagccctaggttagttcattaagtcaattttgtgcaggccgtctccgtcaggcattaacggcagagttttcggcaaccagtgacacattgtattccaaactatgagtgggttcccttgaccgaaggacttggcagtagcagagagactgagctacccgtcacacctcatggatgttatatccacataagcttcgcatggatagttatgtctcagcttgagttatacgctagtagtagattagatcataatcagaaatacatactcactcgggacatcgtatgagaatatgagaatatgtgatctcgcatcttagctggcatctggatatgtttctgtggtcttgtatagcactataaagagcacatattcaactatgttcgattacattcagctcatagttccatagtgccgcttaatgtccaatactacatactccatagcccagctggcacgaggatagcgtgcgatacttctactttcgacgctggggtaccccatgcttccccacgattggtgtttttgccactttggtctttttttagtatgttctctgataaagaccgctttatttcatatattcggaggggaaaagaacctcatatactttgtctaaattgtgtaacccttgaagagtagcccctgcgtgttttgcatctaggaaacttaatgtatcctacccgaagaatatcctttgaaagatttcacccgcgatgagcagaaagaccagagaaaacttgatgcagcgtactcatatgaccatgatttcgacattggtccctaagtggtggcatgaactataccgatgatttgatatctccagaataaccccccaaatatgaacgtgaacagcactaatattgtctgaaagccaccgatacacctgaaactccatgcaaatgactgttttgctttgattgtccaatgcagtcgggtccgtaatcggcaacggtcctataccgtccccgaatccaagtatcacggctcgcttctactccaatttatccaggtgttccaatcgcgtgagaacaacctgcttgcttgtctcttgaatctcgcccgcgagaaagacttcgtccaggatagcgtagacctataaatccggcacacgtggtcagtatcacagctcatgcaactccgatctcacacatgccgagcagtgcattcgtcccggcgacttgcacgtaccttgtagaaattgaagaccaaatccagttcgcacacattgccgaagaactggtccagcacttcgacgaagaaatgaatggcctcgagataggctagctcgttgtcgttcgcatcgacgcagacgcaaaagaacaagccggcatatcttcggtagacgaccttggtactccggcggaactcaacaaagttggactggtatttctgatctcggggggcgacgaggcgatggacctgaacggttgtcggttattagttggatgggaactcggagtaagtgcgggtgcgggtggtattgcaattgcgacgaacctcgcctttcagtttgactttctcttcatcctgtagcccagtgtcagctcaaagtcccaatttcataccgactgatggattctggcaacactcacactgtacggtgaataccatttcgccaggcgcgttttccccctataccgtcattagtgtcgaaattgaaaatgacccgcgcggacaccactcactggcgattctgaaccaggataaaggagaggaccattgttatagaaagccaggatgttacctggtcagcatttatgaaaccactcggagggagtgttgcgacaagctttggatggtctccgctgctcccgttatcgaagctcccctctcatcttgcccggactcaccgcctagatggattctatcaggtgaaagcagggcatggagaattacagcagactattctactaatcctcaagcaatttagttcccataagacattcaatgcatcaactcaactagtataacaatatttgcaaaacatagagtatcaacagacataaagcgtagaattcgttaacagctcccatgacagcccggtgtaacatgtgacaatgagtgacactgcacagtgacggaataagatattctggtttgccatgttccatagcgcccagcagccctcaccccgagctcattcgattgaaaaacctcgtcagacgagtctagaaatactccattagcaaccaagtaatgtagcagtaagaccaagagcaagtccacgaaagaaaaaaaccacataccgtatagctctgtggcctaggaggctctttcggactacccttctgactctgcgcttggctctgagcctgaccctgagcctgactctggcgccgagtctggttctcatcctcagactcatcttcagacccgtaatcctcctccgaatcaggataccaccgttccggatccccattgtagacaagataccagccgattttctcaccgggggcgaggcgatcgcgcaattcctccagtgccgccatctggtcgtccgtcaacccagagccctgttccacgcaatcgatattctctccggcgccaccaccacccccgtcctccggcatctccagaacccgcgttgaaatatacgcatggtcctggctgacggtgccactcgtctcgtcggccgggtcatactgctcgataaacgacagctccggcagccgggtcaccaggtccgcctgtgttttgtggaaggattctgcgataagttcggtcgtcagcggttgctggatgtattccgctgctgcttcttctaggttgtggagtacgatgtatacgcggatccccgtgaacccggcgcggggccagcggaagccgtggagcatatagactggcatgatatccgggtcttttcttgggagccttgtttcggggttcgggagggttatcgcggtatctagcgaccgctagctggggaggattgtcagatttgcaggggattcggagttcatattaagtctgtgtcatggcgggtggtctatcgacgcgattgggttttgcgggtcccgtgcgtttcaacgggagttccgatttgtactgctttaatgcctccaatgaatgcgtgggattcgagattaaatctatgctcgtgtttcattggattttaggtgataaccccgaaacccacaggtctggagaagatcgtgccttgcttctatcacgtgtcatattattagttggcagtagaggctcttggatgctctctattatacccaattactgcattcacaaagcagaatgtgctattccaattattctctcggattcgtttttctctcaatgttggaaatacgaactcccaacctccgagttccgcagaatatgacaggtcatattcggggaaccgcttgatctaatttaaaatctgtgacttgtcgagccagtcaattgcagtcaaagcgaatcgttaaaataggacatttgattcattatgcagggctagaatcaaaacgttcgacctagcgaagccctgtctaaggcactgaaaaggaaaccgacatgaaaaatggctaaaatcaagacgctgagtgccgagttctggtgaatatcgagatagctcctcaatcatggtctcctcttcaaatccgcaaatctccgtgtcaattcatccagctcgggtatcccactgttgttactattgctcttggaggcaccgtcctcccttgagacagcagcggcttttccctctgtgccgggaagcttgactctgggattgggattgtctgtcctgggagctggcggcgcaacgctgacaggacttcggcccgcagtgagtccacgtggaggcgtagctttggtcaattcactggtctccgaggcacgtctcgcttcagccaagttcggcctcagcgcggagtccccttgctgcttgccaggagtttgcggtaattggggttcctctgcatcaccatcgtcaccatcaccaaggtcatcaacaaattctggcggcgcacttcccaactcttcttctgccccatgccactcaacgtggtacgctttcgcaatctctcgaaggtaactctcaacaagatcccgtcctggtgggcgcacacgcaagcccttgagaagccggtccggaaccttgacagtatcgatcttattatcttgcgctagagtcataaactccttgccgtatcgctcgcccagcatagtacgaagcatagtgaattcgcgcacctcgtgcgggaagcgatgccacgcgtagaataccacagtagcagcctcgtcaagcgcagtatcgaggtaggggttatcgtcatccgcaagcccatcaccagagtcatccgccggactaccagatcctgtgataggcgcagcccgctcagcctccttcttttgcgctcctccacccagccaagagaacccgaatatcgagccagtgctttccccagcgcccttgacgcctgcagtggttgataccgtagcaccggcttgttcttgggtgcgcttcttgagcaattccttggcgcgaagtctggcgcgggtcccttggtcgctgaaggccatctgatccaacacgtttgcgcgcgcaagcagcaactcacagtagagctcgaccatctccattacctctactgcgatatccgttgcaatgacattttcgactcggatgcgcgctgatgcatcgcggccttcgctgaggagctgggagagttcacggcgttggacgactgaggaggctgtatctttcttctgtaggagacggagacgaggaataagcaggcggagggtggaaactagtctggtctttgattccattgtgtcagttatttggtttctgtcagacgcgcttaggagttgcagcaggcaggcgttatatgggcagtgcggggtagtcttgggagctctaggtagcgatattttggggaagtgccccggccatgaaatgcatatgcgaaagaagaagaaaagtaagtgagatcatgatgacttactgtttgcgccgagggaggcattttggcgtggtaacttgttgaagagaagatgaggggggaaatggagcccgatggggccgagagaccttggggtcaccactactccatcgggttaccctttgttttctcacagtcgaaacttgaagaatccaccaaattaaaccaatgcaatataacctgttaattaggcatttgatgtgttctcggtgtttcaaggagttctgggaggtccgcccactcccaaggtcagcctcggcttgacctacagttctaccgcaaaagttgtacaaagttgcctacatagttcattcaacttgacaacatgtggctggttccccaattcctgaaaaacctctggtgtaggggttcaaacgaatatcctgtctttcccccgccagagcccgaagaactcctcgctcgccctaatgtctaccgcgaacgcctcttccaacgcatctatcgaactcctaaagacaagctggaagacaccccactgttttcactataccgactctatgagagcttggttttgaacgacaacatcggcctgcgaaacgaattcgaatatttctggtacgcgaagtggccggtcgtttctattcctgatccacaggacccctccaaatctcgctacgcggttctttctgctatcccagcctttttagtcgagtcatttaaccagcgtatcgagctgggtctcccacggaaagccgaccccatcatgtcccgcgaagaaatggagcagtaccaaaaggaggacaggatattcgagtcagcgccagagtggacggaccaggtggcgcggctcgaagataccctagtcattccacatgataacgaagagattcttgggtcgttcaatgataaaagggctagtgagcagctggcagcaaaaaacatcttgcattggcaaccacatattcatctcatttgaaggttgaacatgttggcctatgatttccgatgagttatgacgcgatgaattgttactctcatatatatttcgcttagtgaaaatcgataacaattgcacttttgtcctcgcttctcaacacacttggtgcaacggcggcattggcgacgagtgtttcttgcggtggctcagtgtttctccctatagtgatcttgctccatatggtctgtttgagagcccgaactatatcgtaactttcccatcgcatctgtagcccatttacaacgtccttgattccatcgtgctggatgacagcaacaccgaatgccccatggatatgtccacagacaaccatcttgggctttactctttgtatctcacgcaatagatacccatcccctttaaccttgatctttccatccggtcccttttcgctatcgcagtcaccatatagagctggagggccatgcaccaccagaatatcagtattatcggggatctgcccggtccgcacgtcacggattgaaggatactgaaaggcccaaaggccaaactccggcgtcattggagatccataaattttcacccggcgcacttgctgctccccggcagcgggcactggtatttccagcgtcactgcttcttcttgcaaataatgaatccccgtccaatccaattcctttcgcttcacagcactaattccctcgcgcgaaagaaacttcatctcgcttgcttcatcgaggataagatcatggtttcccgcgatgacaatcttatgggtgtgtggctgagaagacagccagtggagctgtgtttgcacctcgtcaaatgtgccatgggccgttaagtcacccgcgtggactagtatatctccgggtggcagaggaggggttgcattgtgcgtgtctgatatgcatattatgcggattggagggtgacttgggttatttggaagaggaattggtgttgtcgatggtttttgtcgtgcagactgcgtggctcctcggaataagatatcccagaggggctgtactaaacgctccagccatattggtggtcatgataagttgtatgggaagggaagtagatggttgttcatttggagttttcctccaactaaccccctacaacgttgaccaaatgagggggataattaatgattctaaagttccccgtgtcacgcgcggcgcatgtgaactaactagttacgtcatcgtatcagaagggcgaactgtaactatagaatatctattgtgagaacagcataattctcttgagcacatcgatgttcctaaagatagattgagggttggatcacgtctatcgtagaaaagacacctaaatattcacgaacccgacaagggagcatagaccaatcaagaggagatacatcatgaaacgcttatagtaccatatccctcttctcaccatcatcctaagtctaggctgatcacaagacagattaggaagagtagaaagcgaagcttctagagaaattgaagtggcgaagagagagacgataagggtatagatccgattagagtaggataggtagacgatgctcctttgattgatattgataatcattctgagcctattttgccaaataatggcacctgggtacggcccccaggcaggaagttgggcagtggagaacataaaagaatgaggcacctaatgcggctggtgtaacccatggggtatctaccacaagcttcaattgatggtaaagaaggttccttgatgcttgattctaccgatcaatgtctgctcaaaactgacgattcaatcggaggccatcataatcaagcaagcctcatatagaagtcaaaacaattatacttttatacactttattatgtgtgtcattctgtgcctgtggtctgtgattcttattcttcttagatcttagatcttagatatattatagagcgatttaggttatattcaatgtttagtatattatatcagaagacagtcacgacccaaacgaccaatatcaaatatccaccgcgacgatatctccaagccttcttcctggtcccaataatctttcataatctttgctgcattgacaacattcaaacatctcgtagcagtccaaaacttctctaacgattcaaccaggaagtctttctgggcgcgagaccgacattccaagcccgccacgaagatagcccacagaatacatttgaaaagcgcctcgtcatctttcaaaatatcaatcagacccaacagctcaaagactaaatcgtcctgcactgtgattgtttccgtcagtacatccagaatgcgtctcccatatatcaaagccccggttttgaaagcctgcgataatgtgcagagataattgattctttctggggcagactgtcgcagactcgaagcccaggcgtaactgtcaaagttttggatgagctccagcatcgcggtggtgtcttggatatgtgtttggagagcggcaccgtccggcagctgttctgcgatggcgtccctttccttggagagatattgtatcgccgacaacaggaactctggacatccaaggaaagattgctcgattttttcctgggattgcctttctgcttggccgttaaatatgaattctgacagtagttttggtcgtaaaaatgttgccccgagcgtctcgattctattttgtaatcagtcagtctctcgcatggctttataccactaggcctaatctaactcacaaatgaatctgattggagataaacccccggatctcctgtaccgtctgtccaggtccatcattgactccagcttgccactccagtagcggctggtaggatgtaatcaaactcttagcaccctcaagatggaaattccaaccttcactcccagattcgaggagatccagaaaaataaaaagaaatattctagcgacggttgtgtcgccttttcctattgttccgtcaccaagtacctgagagagagcttccatggcttggtgtttgaaaagtagcgcatcgcgattggcattaacgaggccaggagatgtaggaggttgatcttgatggaacgactggcctgtattagcatggtgccgcgccgcgagagcaagtatgcccttctgtaagaccgggtcgttcaatccaaaggagagcaagctccggaatggattcctggcgctgtcgtatacaatgaacaatttgcatatgtgtctgttatctaaatgcgatgtcagctattagtaccctagtgttagctgtttgcatgcggatcttacagtagtctatataatatttcgaagtttgatccaggcttgacatatgcggatcttgcaaggcagccggcagcatactaccttggaccagcgggcggggcgatgtatttggtgtcgatagcgcggaatcgatagttctaggagtttgcacaggagatccatctgatccatctgatatactctcgtacgaatggccttgcatctttccgcgaatcgcaacacccttgacccacctcagaggtctcttatcgaagcactccaggtcggctctttcgcacttggtgcatggtgttccagactggtcgcattgaatgcggcggttgcgacatgtccaacatggatatggcatagggaatgtgcaatgtggggaagaagggtatcagatactcgagtcgggagatatgaagccctggagataagacttgctgactgagcggacccgtggaccggctatccatggatccatccaaccacatacctgtcgacggcaattcttcgccatcacgacaatgtgtttgaacttgggtcttccaatgtatcaagttcatgaattcagcgcatagtatatgtctgtcattcctgctctttaagaagacaaagagaaataccaacagcacagaaaaagagactaaagagatccttcaaacgtcaagaggatattagagacgatctatataaagtacctagacccactgagaggctagtcatccctcataagtggctattcctttatattatgcctatatgaatattggctttctcttccacaaaacccagtgtatatagaatggccccgctatgtcccctctaattgataatctaaacccctttgaaggccacattgaaccatatagtaatagaccgctgaatcgaattctgctagttcagagcaatatgtcgcaagactcccagagtatttattcacaccacaccacgacgtccaaagacagtggggcttaacaagattagcaacggagagaccgagccatctgagacatgtaagacctaagcaaacagacttgcagcaacccccgtcctctcatccctcgaattgctgcaaccaatgcgggtccgacggcgcgcagagagagacaccaggcaccgtcgagccaatcaagcaccgcacaagcgaaatcggacccaaaaaaagcgagagcaagccactataggaaattagacctagacaattgaggtccgtccatgagaagagagtaagttctccggtcaaaattcccaaggccgtatatttagaacatttagtcttttgattggtcgatccaccagtcattcagctacgctgattggcccgctcggttcctgacatcattggcgtgggagtctgtcgccgctatacctatttaggaagaatatcacaactgtatggtcgattttagcaatcccttcgcgtttcagtattgcttagccgtagatgtgaggctttagcgtgcagggtatgcttacttatataactggcagagtttgcccactgaatgtagtctactgtttcctatctcatcccacaagaggtacttcgaatcgaccaacacgaagaatctgacattgacaccttccaccttctttgactacagtatgcgcctatctactctcatattatgccccttatggccaataactaacgagacactttctcctctgcagcctcttcaaaccacaatgcctaccatcccacccacgatagagacaacaatgacacaaacatccacaatcgatagcgctacaagcttgctcaagcgtagcagcatgagcaaccccgacaaataccccctctacatcttcctcatcctcgccggatgtattgtaggaggagtcatcgggttcagcatatactccatgtactacggcctcgacgattcaggcacgttcaaggacgtgggctacgagcaacgaaaatacatgcgcgagaccaggcagcggactatgaacatgctagctgttgaggcgaggagacctgatatgattgttcccgtcggggaattggatgcttgaattgcttgggtctggcgtttggggatgtctacatgaggaagggcctctagtagttaggtatggatggtttggttcgatggatattatatgtaagcaactggcaattatgatgtatgcacccgctatatatatcggaataaagacaggttcaatgtttgtgtatattcaattaaccaagtattccaaggacagtgggatgcttgacccgaaaaatcaaagcgaggacgaacgatgagagagcgctctgtataatcagcaaagatctgtctgagatctttaccctagtggtaagtattgacgaataaagaaaatgaacactgtctttcaatgtgcaatcaaaaagacctggttggttccagcttcaacaagctgtcacatgtgatcaaaacaaaccccctgcataccagaagcaataagagtaatattcaacaagctgaaaaagaagagcaatgccgtggagcaaagggatataaaagtcatgaagcagagtaggaaaaaaagtccaacgttgagcgtcgtcaagaaagggcatccgagggatgacaagaatcgtaaaaatggagattatgtagaagaagaattaaaatgtgaaagaatcgaacaatagatgcccgcgggtttaccgcaggcagatatagtgcagaagaatgccccaaggcagtgtttgtacacacccgtacatatatgcaatattgtactctcaatatagccgaatcagtcagcgctgatttagaaattcacgacaatggccgcaagcgcaccgaatgccagggtcaccatggagacagtggcactggtagcaccgccagtggcggaggatggggacgcagcagcggcggcagcggccgtcatggaggccgctttgatatcagcagaaccagtcagaacgtgcggctggtacgtatagcttagtgtcaggctcgagttgggtaggcgcgcgctggggctagtggcgctcatgataggagttgtggtggagatggagctagcagtagaggtggagatagcagtggaggtggagctagtaggggtggagctagtagtagaggtggagctagaggtcgaagtgggagtcgaggtcgaagtcgacgtaggagtagaggtggaggtaggggtgggtgtggatgtgggtgtgggagtctcagtggtgctagtactagtgctggtcggagtaggagtgggagtcgaggtgctgatgctggagctgctagtggaggtaggagtgctggtggaaacctcgatggtctcagacgaggtgctgccgttaccctccttctcgaagacgataatgtgcgcggtctcgcccttagggatggtcacgacgcaaccggtggcgccgccagcgccagtgaagggctgaccgatcatctcgttgacatcgttgacagcagggtcgatcttgcagggcaggccgttgcagccatcaccctcacactcaatctcgataccgaattcaggcttgactttgcggaaaggcgtggtgggttccaagtagatggggttccaaccgatcttcaggaaggtgttgccattctcgtcggtgttggcccctgcggtatacggggaccagttaccgacggggttctcggaggtaccccagacacatccttcctccgcggtgacaccaggagcgttaatatagtactgggcagcagtggagcaccagtaggacatgccgggcacggccaggtcggccagctcatcaaccatggtggggataagcatggcctcatttccaggcaacacagtctggcagaaagagacagactttccagccttattgtgggccttgagaacaccagtggccgactcacagtagtcgcggttggggaagggtttctggattttgccatcctcgtcacagtacagaccacccctcatggacatggggtacgagtaggacgtcgcatcgggatcccactgcatagacacctggccgggagggcaagcgtaggggcagtagttgccaggtttgcagggctcgtcggggctcatagcccaaccggcgttttgctcttgcggggtgatctcaaccaggccagcatcggtggggaactcgcactgtccactcctcttttccaaaacaacatcacgagtctcgtggtgatggctgtggccatggctatgtttggcggcttcagcgctcgcaatgagggcgacaagcgccgctgcacggaaggatgtgatctggaacttcattgcgttggggaaaagactcggcaaattgataatataaacgaatgtatgtatgaagcgagtggctaagtcaaacgagtgacaaaaagatacggccgatggccaagggcagacacagtgctcacagataatgaaggtcaagacaagcgaagggaaacagacggggaaagcaccaagaaaagggacacggcctctagggagtcccggctcaggtccacgagtgtgctaacctaataaggcgttagatctgggatgatgtgcgcgcaattccggtgcagagcagagcagccccgactttcataggcggctcgtccgtgattgaccataattcccataattgcgccctaaactggaaatatgggcgcagccttggacccccaaaatgctgtgcccctgaagcagactccactagtggacagccactagacacttagtgtcaggggcaatgatagcctgcagccaatgatgaacgccattaccccgatggttcctgcttggcagggggaagggccaataagctaagagatatgcattttgtggagttgtctctcgaactctttcaacggcaaaataaaagcaaaagataagtgttcaaatgaagaggtgaagaaaaggaggaaaaggcgtgcgcaacctttacctgagaaatcctgtcacatgacacctcaatatccacaacatacctgggtaactaaccaactaataaatgtggcatgagaaaaacccaaattaagtgaactcagactttaccgagtacatcgtacgttctgcacgagaagaagaaatatccaccgaaaccaatgaatgagttaatattcccaaaatgggaaatattgctcatttagcctagtacccgtcaatcccaatcaaacccaccatactacaccgttttaaacatgttgatcaacacaagtgggctctcttctctttgataggcatggaatcacatggccaagaaattcgaatccttagagcgtttgtcccggctgccaatgtgtcgctctgtggtttagacaaagcttgacctgggagagtatgggggttttcatggcaaagcaagcaattaacaagatcgccgctaagatcactttgatcaagggctccatgagacgctatgtccaagatccgccagagttgccagttgtaaagtgtgcattcactgcattgtgaggatgcccggtatcatccggaatatcaatgcaagaagcatggacctgattagtacgtgatgcaggtggatgtcggtatcttcgatggcttgggccaattatatcggattataaaagtcttccggttagttagttacgtcgtcaaagaccgagcgactcttctttgtacttcttcaaactgcgatttatatagcttagtacctagccctaagctgcggcgatccttgcggcgtctacaatcatctcctattgcaacgaatgctaagagtgaaaatcaagaacggcattgcgttgcgcatgataaacaggatgtcttttttgagtttgctgtaaggactgttgatgttcctcgcatggtgagtatccactcggcctatcacttggatttcgcggggccaagtgcatctgacaatatatgacagatcgcattgacacggccataccgttattttttttggtgtcttttgtgctgcttttcggaggatctttatactactttccaatggatttgggtgctaccattatgtggcttttataatgaaaaaaaaaaaacaggttcaacaatgccctagctattgcgacaatccaaataaatgaaagagtctagcaggtaactgccccagaaaatttctcagtcaccttttaatacaatccaggcttcctccttgtgtatagtcccatcgctgtagctaaatcttgcaatgcaactgaaagttaacctccctcattaaagcggcggcagcctaaataagaaagaagagggctacaacatacagcgatcccttattaagaatagaagaataactggtaattcgcccagtaggtttttctttcctccttggggattatttgaagctattcacactgctgacccaccttaacccccacccccacaataatcttatttctcttttacgtgtgtacatacagtcagactggagggaaggtatggaagatagaaaatgtaatttgctcttagatactgcatcgtgttggacagggctccttggcctaaagttattttggtttgtattttcagatatgcatcatgacctttcgttatagagctgcatcatcagacatcaaaaattcacaaacgaagctattcgccttgctgagcttgtaggtccttccacccagcaaaagccaagacatcatcacggtctctccatccccaagcaatgcaataatgccgtgcaagcaattgccactcctccatctcatccagcatctctagcccagcaactctttccttctcatcttcgttaacccacttcttccaaataaactcaatatcagcggcagcctggccatccccaaagccctgatcttggaagcggtctcgctgcgcctcaagcgatgcatacctagcgagagtcttgagctggatgccccgcgccgcaaggttcgacaccatcgtacgaccaaaggcatcattgggccgaataggctcataaagaatcaacccaagcggaggaacatttacccgcgcctcctgcaagatgtctccgggcccggatagtggatgcccatgaccaaaaaggcgttgcgtaaagaacgcaactacctgctccgcttcagtaggcgataggtagaccaaacagcactcggagatcagcaaagtcggcaatcccgtgtccacacctggcagtgctccagcagggtcactgcatgtcgacagcgaccgcagatcaaccgggtggacatggtacgagggcgaatggagcgcgtcccccgcctccgacacagtaattcgagtatccttttccgacgaagcctgcgacgagtcaatcccaagcgccctctgtagcaaaggcgccgatctaatcgcgcggatcttttccgctgtgttgacggcgaaatcgagctcgtggtaaacgaagtccggggtttggcgcgacgagagaagccggaagacgcgcgtgtcggacccggcacctagagatatgatctgtttcttgtgtgtattttccggtgagaacgggccgaggaaacgcgccacgagctggtcgatagctgttgtgcgggcgtaggttcctaatgcgcggggacgtgtccgggtcagccgtatgctctcttgtcatcgggaatagcgtagtttgaggggtcgggctcacctctgttgatgattggcaatctacgcgtcgccgacccggcaggtgtcaatgatgccgcgtacacatcctctagatagcctagctcgacggcgctgaggcgggacacgcttgcgtcattgtctgtgccttggacgatgcggtcttttccagaagggagtccagcttcttctgtgcgacttgtgccacggcctcggcctcggcctcgtcgtagagtgtttaggttgggaatatgggaggccatgaggaatggaggaagcttggagcttgagctttcgtggtggggtagctatccgggcgtggatgtcgcctcttaacttcatacccgatttctctctcccaatattaaatttccaacccagttccagaatttgtatcttcgtcgaatcattcttatcgcatcctcgctcctacgtcttgtttgatcgactcggtgactacaacccgttcaggtagaaagttgtaagattcaacttcttacgttcaacagcgaagaaaacgatattataacattgaacatctcggtccaacatttagtacaactgctccctactgccaataccaccgagttactacagagctacgtctgttcaactccccaagcacaacatccctggtagggctgccactaaatctacctatgccaacttactcttgacaaaggcaatagcctgtgcgccatactcagctccataaccctggtgggtcgcggcgttactcccgttgcagcagtacgggtctgtggagtcgcagtatgattgaatcttactagccgacgggcaaaagaagccagaaggacgtgcgtcaaactatgtcccaagagttagatgcaaggcttccaagttcagggggaatatagggcagtccatacacctccagcagcacaagttccaacatcatacgacaaccctgccacatacagcgggtcacccatgaagatggctgccttgaccatgttcacagcggacgttgacagctggaccgcgctgttggagtagccttggttggggacgccgccgccgcacaatgctgcgtccatgatttcaccaccctaaagcatcgtaagtacatagttggtctttcgttttgaatagccgaggaaatctaacccacctgggaatatccgaccagaacaagcttggtcgatggacactgggtgttataagagttcacagccgaggcgacggctgcaatgccctgggcaactgagttggagtagctcacgctgccgcaggacgattgtccaccgcatgcagggtagctgatggcctcggccgtagagcctggataggcattgagaaggccattgacaaccgtgatggacgagccgtatccgggagatacggtggtctcgcgtgcaccaaagatgtggacacccgggcaggagatgcgtttctcaatttcaacctcaaccgggacagcgagggcgccgccggcgagtagggagaatgtcaagattttgggaatcatgatgtcaatggatatcaatcagaaaagtaaaataagcgatttgttaccttggatatgctcgggtttgcaaataggtttgatatccagactccggagaccacggttgctttatatagatctcgaatgtccccttggcaacagaaaccggaatatcattgtattttgccgtatagcaggccatcaagaaatgaatatgaccctttggaccgggcggggctttttgcctaatcgttgtctgattatgaaacctcatctgcattgtggcagtattgccaggttcagaatggaacaggagctacataattaggctgaataaaccggcggataggcctaaaaagacacaccattggatctgatgttggaaatgtgacccgcctgcatttaacttaagccagttctccgcgttatttcaggcaataaatcgtcagatctttctggggtatgcaacagggatcctcgctctgaccggtttggaacgagctatgattcttcacaaacatttcggcaaaaagggctatattcattcccaggggtataggcagatatagagacctgcagcattgacatcgaagatagtcagttcggcttcccaatcgggtatggctcgagacgtgcttgtttcattggtctcagctatagggtccagtgtgcagggcataaaggtacatgtctaagtggtccttttattcctgatggaatctgaaatactaaaagtaggatcatggaatacttttttcacggctatcggaccgaatctgaggaccgtggtctatctttgtcatgtcatgtctcttttctatgtacaagtgaacttaaacaaagtatctaaacataaacaaagttgtttcggcaaagaggacaagtgctctggttgctgctcttgaaccagcggaacagacagaccgagtggaaggtgttcttgcaagtggcacagcgcttgttcggtgtctgcatatctgttgagatgacagagtaacagatagcacactcgctctggcccttcagagcaccttggacgtttcgtcggaaggccagcaatccatcaactagattgccatttgcaaacataataactccctggatcgtcagcagccagctcttccatttcttctcatccacaagcacgcgactgcgaccgacaaccaacgcgggttgaagcgggtacgcgggtgggagagttatggaaatagcaactggaggcgactcttcatcgactggaatgctggcaatgatttcgcctgtcttcgaggaaatcttcacctccaatgcgcgttcttcgtctgcatcctgggtggcaatccaatcggccacgcttttgagtgcatcttcgacaacaaggggggatatctgggaacggtattagttatagttactcgtttagaagggtccaatatcaaaaatactcacatatttttctgaccaggcttccaccggacccttggtgcgtttcttagtgtcaatccaccaattcttggtcatgttggcagtgtatctcaggcaaagatagtacagatgtaccaggagccactgtgtctccttctcggcactctcggactcatctggctcaaatgatcgaatatcaagtttcgatgcatcgatcatctttccgtgagatttctgaaggaaatcaaacgtgaattccagcaatgggaggaggatattgttctctctgatgcttgccgtgtagtattcctgcacagggagcgactgatcggactgttagcaagtttattttacaatttatcgtaagagtcaaaacttacagcatttgagaagtggtcaaataccaccttccagctgagaaggtacgcccgcatactggtccacatcttgtcatctccgtaagcagcagagaccatttgcattgtcggaggctcaagcaataaagacacgagctcatcaggaaggctgactgcagtctttgataaggcaacatcaaaagataccttctcctgcacatgggggatatagtgatggagaagagtgtaagcagttcgctgaattgctcggctgtgtgcagttagaagatggaatgtttcactgacatcctccaatttgtcaacggggatagtgttaatcaggcgtcgtaataagtcaacagcaacatcccggggttgatggaatgtggttgaggaatctatattttgttagacatatcagtgatgagagaaacccgaagcgcttaccaaatgtgtcaatggtggaggccagggcattgaaaagaccggcctttcgatctgaccaagcatcttggacatcgtcattgctgtcactttccgagatagacttcaatcgtgcgaagagtctgaaagatgacaccagtaatggtagaccctcttcacctccgttggttccccgcaagacagaatttagaatgtccatgctttcttcccaatgagatccataaatttccccaagagctggaaggacaagggacaaggttttgatgacttcggatttcaaaccaagaaacattgagtcggattgcagacattcaatcaagttcttggtaaggaaaaccaatctttgtgtcggaatggtggagacaacatcttcttccccagacaatagaatgtttaacagaaccagcttccgcaatcctgcgcaaagttagtaccggtgctatatctgctaatgtgttatcagacacttaccaacttgggaaacatcctggggcttgagtccagtggaatcggcaactagctcattgcagattctgtttccgatgggatttgaaagtatggagcttcgcaacactgcaaaccacgatgccgagcggatgaggtttgctgttcgggcctccctgcagatcttcgcgacgtcctctgaagatttggaaatttgcaatgaatccgcaacagtcattatcttgacgaaggcttcgccgaccctatagtccaagggagatgtaccctttagttcctctagtctgatttcccagaactcggcaagcgaggaggaaacggtcttctcaggtgcgaagctgactggctcattgtcacgagtccagttaccgagcacctttcggccagcaaaaacaatatccatgtattcttcgcgctgatcagccagctcgagacctgagatgccgttgcaattctcaatgctcaaatcgtcatctatcagttgaattgctaatggcaagaaatggaacaaagtctctaggtcgccttggtccaaatgtttccatagctcagaagtagagagaaggttgatggtgtagattgccaggcggaacgcagaagagcgatggtctgaatcgcgaggaatggttggccataaagccttgaaggagtcagatagctctcgctggatcaagtgaacaacgcctcctaatggactggttatagcagtggaaggtcgaggtggaagttggagaaagggggtcagggatttctcccatgaatgacgagagggcagaatatccttcacgctaccagtggccgtaagacctggcagcagttcatttgcgatagcaagaagtgattcaatcctgaaccaaagttagcacaatgtcctacggaatatagtagcaatgaaggacccacgataatgattcttcatccacatgactgaatccatgttggagaatttcgatgcccgacttggcactcgtatcaccaataccagattccttcaatgatttcaacaacgcttccgccaagcttgctacctcttcagatggtgactctgtgaggaaaagtagctttcctgctaactttgacccatgagctccattttggaactcccgaaaggaagatggtgcagacttcccaatatgagagagcccatgcaaggtatcaaacactttatcttctgaagataatgcgtcgatcaaagataagaaaatctgatccatcaattcgccatgtgatgttttgttttgaagaactgcagtgatgataggccaatgagcatggcttccttggcaagctttgccaagagcccgcacaacaagtgagttgagcttgtctttctgctcaacatcattgaaatcgagagaagaaagtaagctttgaagtacgtgcacattagactgttctggctcgagggccaaggctcgctcaacgacgttctcgaaactgaatgcaaatccatcccactcccgacattctaagatgatcgagatcaatcgatcggcagatggtgaaagcaaaagctccggtgcatcattttgcacaaagctttgaaggtctcgggattttttcgcaacagatggcaggctgcgaacacattccagcactgtgccggccgctccatatggtttcccattacgagtgcgcagtacttcgagacaaccttcgagaagggaagtagttgttccttcaaagacttccgatacttgaggctcgacctcggtatctgagacccgtgagagaacagcagactccaagttcaagaggcgtttggattgggcacatattgagtcttgagattcacggaagtcctttgattgctctggggacgatagcttcacagcttctagcagtccatcggaaaggcatgtacacaatgattgcagttcctgggcttgctcggcggaagccagagtgaaaacataatccacacaaatcccttcggctaactcgtccggaagtgaccattgagtcagcttcgggtcaatttgcacatactgcaccaccaagggagacagtctctgtgtgatgaattcggatttttgctcctgggggaccaacgttgcaagccatgctcctatatgggtataggatttccatccgatggcaaggtttgaacgcggttcttctctcgagttgaggccttcttgcaaagcctcagtcaaggcaattgcactggtagaagtgattccatggtcagcagtggccttgtcagcacctgctagtacttcttgggggatgattcgaagcaattggtctaaattcgaccaaaaattagaatgtccgccctgggaccccttctgcatgtactggcgcaatcgcttcgaggcagatgatttcccagtgtagtcatcggtccatatttgaggtctcagcgaagataataaaaggagggactctgacaattcggcagccgatccgatttgcggtagagacaatgattttccaatgatggctgaactgagagtcttccagtcaatccatccaggctctcgagaaaccgcagttcggagcaggatgtatatggatcggcgaacatatggatcatcgtggtgacagagagcccacaaattcttactggctaacaggttctcgatttctggtaggttcttctgcaaatcttcatcggacgaattgcctagagacgttgaattgttagacagggaatactgcaagatagaaacgtttaatatacctagtacgcggttgaaaagcaaaagtgcagctcccgcaacacgggcatactttccttcagcgtcgtctctcttcactgtcctttcatcactcaatgtcaaggctgtttggtgaagaatgacatcatctacaaagtccaaaatggagctttggtagattttccacacgttgtttcttttttcttcggttgtgaagacttttgtgaacgattcaagggcggcacggtggaccggtcgatcattgtcgtagattcctgcgatccatgctccgatgattttgggtaaattgggcacgatccgcttcccaacaagaccagagattgttccttgtataggatgggcaagttgacgtacccggcgcgataaatcaatcgagagtctgggataaattctgacctggaagaaaacattgttattacttagtgtttgtatatggaagcaatctagacatacccatgcatctagaaacccgtcatctagtgttcccatcttctctttcaatgttgaaatatggtcgcgcagctcctctagagccttcaatcgtgtaatgtcatctttctttagtaagttcttgaatgcgataactagttgctgctccgtaatgcgagaaagatctggcggcactgcaatgtatgtgagagcggacgcctcctttccctcgccagagagaccaccagagaatcccccaaatgatccaaaggcactggcagcagcgcgactgctggaggcctgggatttgaactttctgctcatgtggggtatgaggtccgcgggataagcaactagtgggggaggacctcgaaattgaggatttggaaaggcttcggagagagcaaggcgctctgttttcgaattctgagtcagactgtgatttgaatgcctgtatcactcttccattgcgtcaagtaccttcaatatcggatctccaaaagatccgcgggaccaagatatccatcacgtgagtttgtgtcatcgctgtcccgaataggacaagcgcgtaggcggagccgcgaaagatgagcgcgagctctcttctcttctgattctttgccctcttgcgttttgcgtcggagcccagccaagatgaagttcttcattgagtatgttccctatatatgattctatccagtctccaagctgaccagtcagtgatcttccggtgctgtttccttatcctcgcatctaccccgaacaatatgcctacatgtgcgatctcaaaaagaccctcgacgcaggaggtcactgtgtgctggaaatgccctcgggaactggcaagacagtttcactattgtcgttgatcgtcgcataccaacagcactacccggagcaccgcaagctcatctactgctcccgaaccatgtcggagatcgagaaagctttggcggagttgaaggctttgatggaacatcgtgctaaggagctgggtcatgaggaggaatttcgtgcgctcggcctgaccagtcggaagaacctctgtctgcacccttcggtaaagagggagaagagcggtaccgtggttgatgccaggtgcagaagcttaacggccgggtttgtcaaggagaaaaaggagcgtggtgaagatgttgagctttgcgtataccatgaggtaggactttgttatttgcaatacaacattgaacgagctaacaggcctagaacctttacttactcgaaccacataacctcgtccccccgggtgttttcacattggatggactggcgagatacggtgaagagcacaaacaatgtccctacttttccgcccggcgtatggtaggatatcgagcgcgtattccaccaaaagtgtcccatttctgacaagctctaccagatgccgtggtgcaatattattatctattcctatcactatcttctcgatccgaaaatcgcggaacgagtatccaaagagctctcaaaagactgcatcgtggtctttgacgaagcgcacaacattgacaacgtctgtatcgaatcgctcagtatagacctgagcgaggattccctacgcaaagcgactcggggtgccaacaacctggaacgcaagattgaggaaatgaagagcacggatgaggaaaagctcaagaatgaatattcaaaattagtggagggcctgcaggaagctgagaaggcccgggaagaagatcaattcatctcgaatccggtcttaccagatgacctactaaaggaagctgttcctggtaacatccgccgagccgagcatttcatctccttcttgaagagatttatcgagtatttgaagacccggatgaaagtcacccatgccatatccgagacacctccttctttcctcacccacctaaaagaccttacctatattgaacgcaagcctctaaggttttgcgcggagcgtttatcgtcacttgtacggacgctggaacttgtcaatattgaagattatcagcctcttcaagaggtggccacatttgcaacactggtcgcaacttacgacaagggattcgttcttatcctcgagcccttcgagtccgaagcggctactgtaccaaatccaatcctccatttcacatgcttggatgcggccattgctatcaagccggtattcgatcgcttcagctctgtgatcattacatcgggaactttgtcgcctttggaaatgtatccgaagatgctggggttcaccgctgttctacaagaatcatacagcatgacactcgctcgacgatctttcttgcccatgattgtcactcgaggctcagaccaggcacaggtttcatcttcctttggaattcgcaatgaccctggtgttgtgcgaaactacggaagtctagtgaccgagtttgctcgcatcacacctgacggcgttgtagtcttcttcccctcttatctctacatggaatcaatcatcagcatgtggcaaggtatgggtattttggatcaaatctggaactacaaattgatactcgtcgaaactcctgatgcacaagaatcttcactcgccctggagacctaccgaacagcgtgttgcaatggacgcggcgcgatcttgttctgtgtcgctcgaggaaaggtttccgagggtattgatttcgatcaccattacgggcgtgcagtgctgtgtattggtgttcccttccaatacaccgaatctcgaattctgaaagctcgtctcgagttcttgcgtgagaactatcgtattcgggaaaacgacttcttatctttcgatgcgattcgacatgctgcccagtgtctgggtcgtgtcctgcgcggcaaggacgactatggagtcatggtgttggcagatcgtcgattcgagcgaaagcgtccccaactccccaagtggatcaaccaggcaatgttggacagcgaaaccaatcttagcactgatatggcagtatcaaatgccaagaacttcctacggactatggcccagcctttcaagcagaaagatcaagaaggaatttctacctggggcttagctgatatcgagcgccatgaggcaaagagaaaaacggaggaagcacggatgactagagaggaagtgaataacgggcacccaatggacggagcaattccatccgcatcccggatcgtcgtggacgaatacgacgatgacattgatgaggacctcatgatgcttgatgcgtaataaaataatcttgttctttatatgatgaggcatctactagcataagcagggcgtttggaattgagcatggcgccatttagcacggcgtttccaaggcagaaaccatctaccttacaattgaagacaaatatcttaacgactatcctttggagctatggaagctatctataatattttgagcatagctttgcatgaagtacgggtaggttctttataagctttctagatcaatttcttcggagaagatgatctcatgtaaacatgtaggtatatcattgacggattgcttctgcttcttcggcttaacaactcttttcttccgtaaaaccacctacagtttgataccccagatggacgaccgttgttcggagaccaatcgaaagaggagacgaatctcgaaaagaccgaaaatatttatgctctgcagaagttctgatggaacttctgagttacaggttattctttaaaagaattctcagatacgacggggctactacatgaagtagaagagttggtatcttcacttatccgcctcgaaaatcaccttgtgggcccgcatgttatcgaaatcgtcatatctaccgaagggtcaatcatagggtgtcaaggactgaacaagaagaacttacgcctggacggcctgtgagagcggacgaatatcatgacacatgaagctaggaaacgttagatcctcgcgaaacaaataagagtaggtcaggcaaactcacttgagaatgtcctgcttcttttcgaagaggtccagcgccggaccaaagatacctagcacagttgagcaaaatagccaaagtaagatgtggaattaaacatactccgaacagggcatcggcccatctgtagactgaggttcttcgcgtaggcttcattcccggtccacgggatctcctggttatggacgcccacactcgatatccggccccaggggcgtaacaaatcaaagcccagcctgagagcgtcactatgtccgacgacttcgataacgatatcggctccacgaccatcagtaagatcctttaccctttgacgcagcccttctccgtcttccttgaaattccaaggctccgctcctagactctgtgcaagtgctagtctggaaggtacactatcgattgcaatcagagtcttcggcttgtaatcgagagcaccaataagtgcgcagataccgacagggccacagccaaagaggagtagcgtgctttcgtgaatctcctccggagttaggccagagaaggcgttcagagaggcaaagtacccggtggggaaaatatcggccataagaaccaacttcttctcgtcgatggaggctgggactttgacaagagtcgagtcggctagtggaatccggacatattcggcctgtccaccatcaagtgcaacagtaccgaatagctggcattgagcgcaccgagaggagaagccacgcttacagtagaagcacttcccacagctcgtggtgaagggtgagactactcggtcgcccttttggaagttcttgatgtccgatccaagttcaacaacctcaccagtaaattcgtggcccatgacaaattcgattccggacttttggtggccgcgaaagacatggagttcactttgcaaatatgagcggttgtatgctgttagatatagttctctgtttcttacctgccacatagcgcagtgtatcgcaccttcaggatgacatctgttggatcttggatcttggggatgggcttttgctcgatgactaccttcgacgggcccttgaaaacgacagcttgcattttgcagtatatatttcctttggtttgtgtagaatatgctaggatgttgaatgacgttggaactggaagtctaatttaagtagagatatgcctagtccggcgacatcaccgacggacctcggcaggtctcggatttgtggtggcacgactggaaaacgacaaacaggattttggcataattgtattgaaaagtaacaagacctattcttcaacgatttcgagtgttctaaagaggcctctgtccgaaaggcaaaactggccttcatccatccaatgaagggtatatcaaagccgtttttagcggcgggggggctttttgcggggagaaaagattgtcggccttaattttaaggttgcactgaccgcttttctcaccggctttactttgacccctctattaattctcagtggtacctttgctttgtatgtaagccccatataaaagtaagtcactcatttaaccttaattcaaaagtgtaaaaatccagctggcagaactatatactacctgaggaatgcggcagaaaccaggcattttcaggcaggagtggttataaacaagtaaaagccatattacaacaccctaaggaaaagatctattttcaactagtcaagatgctaatatgaacaggacttttgagttccgctgcaaaaagacaaactccagatcatcgacacatcaaagatgaagcgaaaacacaaaaagaataagagcttcgcataaacacaatatacacacatatgaagggggaaaaaacatacacattgcagaactccatccagtcaaagactatgctacaggagcaagaatgtcgaaggaaccagtgccgacggtgccgacacggccaacaacaattctgctactagggctcttgagattatcattacctctctcgagcacaacgtccttcagggcaccgacagtagtctcgaaactggcccgcgcgaaagcagacgaggcatccttaaccaagccgttacgactgaaggccttgaagccaccagactgtgtcatcacatcaccgatcaaattcaagtgacggttgtcgacggagatactgtgaccaccgaaaacggcatccatttcgcggacgatggtagcgcgagcagcttcgacaccgtacaggttgagcatgtcgtggatggagttggtgtagatcgagtggggcttaatgatatcctggtagtcgcgcatggcgagaaggttgacaccctcggtgaggatgttggcgggatcacccttggcctcatcggccgggacgaagacacagttgcccatgccggggatgcactgaatgacggcgaggtggagaaccttctcaaccaggggaaggaggagaagcttgggtgtctcaacgtcgtactgcagttggatggagcacgagttgcccttcttcgggtcgaacttgaactttgtaatctcctcgaatttgcctatcacatcctcctcgcgcgccttgctgtcttgggcggtctcgtcatcagactcatcctcggaatcggagtcggagccgtccttcatgcgcacgtcgcgagtggccttggcaggcttgctgctttcattttcgtcatcttcgtcttcgtcgggggtgtcttggcgtctgatgatatcctgctcggcggcgtcgggtccttcgtaggagacctggtggcccctgttctgagctccggcggcccgcttggcatcatcctcatcatcttcattgtcgtcgtcggctggttgggcttcggtgtcggcgcctctgggtgcctccgcgattttaccgactgaaacaccgatttcaggctgagaagttgtgcccttgacgcccttcttctcttcgttgcgcttcttgagctcggccttggtgagtctcaccaaccgagggatgagcttagattgcagagcaatcaagacatccttggtctcaatggcgtattccttggtgtattcttcagacgggaagaagtcgatctcgatgtcgtagattttagccttagcgtagccaatgcccgagccaatgcgttccttgacttgcaccttgtcaacaagttcagcaatgctcagtttgctgatagccttggcgaatttctccgagtcctctttggaaatctcctcgttcaaaagaagagtcatcgtaggcgtcataatcttggcacttgctgtcataacaatttcacgaagacggggaatacccagtgtgacgttctttgccgagtgaccagccaaatggaaggtgttgagagtcatctgtgtggacggttctccgacggattgaccggccataattccgaccgcctcaccggggtcaatgatagacttcatgtacttcatgttcattaaggcctcgaaggtcctcttgctgaccttgccctcgatgttcttcttcttgtctttaatgagcttactctggttgacatccgaatactaatttgaaaagcttgttagaattgcaaagaatcgcagcgaagagatagcgagtccataccttctttagctcctgtgcgaacgcttcagatgtacttccgaggtttcctccaggggggaagtgggataacacagggtccacagcatcaatctttccagttttgcggaccgccttcatggcatccttgtgccagttcgtgacattatccttcgccagcatgtgataatcatctgcctggacttgcttggaaatggagatgtggttctgagcaaggaaatcaaagtcgttcaggtgtacctgtttggtgatgtcgagaccgtcctctccgtacaagaactggacaatggagccatctgacgcttcgcggacagaggagtcgtattcagccttgagaccttccatacccttgattaaacaacgttgcaggtaaccagatctagatgtcttgacagcagtatcaatcagaccctcacgaccagccatggcgtggaagtagtattcttggggcttgattccggtcaagaaacgaccagagacgtaaccaccggccatcgggtgagtttcgaaagccttgaatgacggaagagtctttccactgatcatgagtggtacacggcgaccctcaagaacctgttgaccaagattacaagaaatcagattggcgttaacactagatcccttggctccagatatcgtcatagactgcatttggttccaggggaaaggcttagcaaggccgtatgggagacaggcgctggtgatttcagaggagagcttggcagaccgggcgttagaaacactatccaggccactttgcttgtcgtcatcgcgaagaacctcctccaatcgtcggttcaactcggcagtctggtcaccaggagcctggtccaaggtgacatacttcaaagcaacttcgcgacccatctgaggagcagtggccagcttctccttacggatacggtcaccctccttggtcaatcgaagatcgtcgataccacaactgaagccacgcatgttcaggacgcgagtgagaagtcttccgagaataccgataagcttgccagcaatgctgtatccataaacttcatggatggcatcgatgagaccaccggccgtgggaccgagctgtttcttatcaaggataccacaaaggtactctccatcctggaagataacttctccttcttcgttgccctcgccccatcgatcgccaggggttgaagacttgctcagcaaggtcaaacctcctcgctctggaggctggatattcttgagaattgtcgtgatgagctgctttccggtccacaggcacttgggcttgcgcatggcaggctcgaccagttggatccggtcagtgacaatatgcgaatgttctggtctcaagcaactgtacaacagctggtggtaatcctcctcgtcatagaagctgtcacggcacgtaacccacgttcccatagaaatatgatcttgaatcagacctctgagcggttttccggatgtggcaacgagatactggtggtcggcatctgccaacattctggcttccgcttgggcaagctcattctgagggaaatgcatgttcatctcgtcaccatcgaaatcggcgttgtaggtgttacaattggcgtagtgcatgcgaataacccgctcattgggaaggacacgagccttgtgacccatgatggagggtttgtggagagttggctgacggttcatcaagacgtaatcaccagtggtgagatgacggtagaccttcttgttacgcgaacctttctggcgccaatttgacggtgcgagtagtgagttggcaagtgctgttcgctcttccaggttcttgaacttgaggttgatgacttgtccgttttcgttctcgatggaagaagcgccggggtatttgtcgggaccgttgataacagcctccttcaactcccagaagttgtggtttgtaacaggctcagggaaagtcaacttcttagcgaagacaaggggtacaccaatctcattgggttcgatgttaggatcgggcgagataacactacgagcagcaaagttgacacgcttgcccatcatgttctttcggaacagaccttccttcttctcgagaatctgcttgataccgttaggctgtgctaaggcagctgagccggtgacagaggtacgctcgcggtccaccaacccgttgaccacatcttggagttgaacaatggcttgaaggaggtcactgtagtttcgtgcccgagacatggtcttctcttcctcgttttgaatctccttgctgatttggttgatagtgtcacaaccctttaaaatcgcattgaacgaagtgttctgctgtgcttccatgactgttccggcaccctgctggactgcggggcggtacttgtttggtggcaccaaaagactcttgaagaagaacatgtccgccgacacaactttcattcccttgggcacaggtcgagagttgtagacaagctgcaggatctcgctttccttttggaaaagaagatgaagagctccatagacttcggaagaagacatgaattcctggccggtcgatccctgtacctcctgcacgacagccacaccacggcgaatttcttcctcagctccgtggatctcagaaacgccgttcttggacttagagttcctttcttgctcgagaaggaccatggtattcggtgcttggaatcctccttgcaacattgcaagcttttgcttctcgggtaattgctttcggaagattttgttgtagcgatcctttttataggcgggggacactctgccataatgttagctggaaagccaaagtcagggtcgaggaatattgcataacgtacccgctgcagctgacacatttcttgaacgaattgatatccttgaagaaggccttaatcaactctcgcctggcctccgcggcaatagggttttgtccgccaggcatcaaaccgtccaatttgccctccttcttggcttcgcgaatgcgccgagtgacataatcagtcctcttttgcatatagtcatcctcatcgggatcgtctgagtcgtcggaatcgccttccttgctggtcgcctttgatttgctacctttgacggatcccatcgcatcgacaacagcgacttcgtcaaccaagccatattgcagaaggcgcaatttgcagatgtacatgttgacctggttgcgacccatctgcaggcgaaggcagtatacacattgtgctcggagaaggcggaagatgtgatcgaagaaggtgacattatagaatggtactggcagctcaatgtgtccaggatgtccggtacaagtgaatgagttctggcgacaggttgtgcatctgtagaataagaaaaactcaaacattaaagattgaacagtatactactcaagtcaagacttacacatgatctccccaagcgcccatagcagggtcttgaagaccaccaggaacaggattgttaaatgaatccagagtcggagtattgtgaattcttttcaccgagagagctttaatctcttcctcggagtacacattgaagtcgaccccattaatcgtcgaggcgacggggcgcgcgaaagttgccattgtagcctgcagctccttgagcaacagaaaacgctgtcgcgcgaaatcaaagtgcttggatacaagatctccaagtgcttttagttctggagcgaacttttttttttccggaccaacttcttttctgccatcgcgccaccgccttacccttttcgggttccgtgtggattgatgcacaactgctgttacttgtctatcctttacgcattcaacctttttgtttttcctttcgtcggaagaccgagtgagaggccgtctatattatggctgatgcatcgggcaatgcgctcaagcgtcctcaccctgagggtcaacacgacaactcccagaaaaggacccgctccaaccatgggtcgccagcaccaggtcaaggaggtgctgccccgggcaagccagatgttgcgaaaataatggcagaagcaagggcaaaggcagaagctgtacgcgcacgtctacaagcacacggtagcttaccagcgaccccaacaccaccgcctgcaccttctgcaaatcctcctccaccaccaccacccgctcctgcgatgtcgaaactagaacaaatgaaagctcgagttgctgctgctactcaacgagcaagtgtaccctctcagccgcgacccagtgcacccgcattatcctaccaaccaccggcgcatgacgatgagggcatgtcgaaggctcgcggtggtctggatgttggccttcatcccgcgcttctgtctgatgctccaccggaatatcgtggtgcaaatggacggcagtctaagccaaaacgtgctggtgggcctcagcttgatctgtctggtccgtccgccgaggaaatcaggaataatccttacttcgacccctctctcaaccccaaagcgactattgcaaagccccgacaaacccgagagctcctttttaatcaaaagggcaaatacatccaacaggcagcggctctacgcagacaagcacagctagaagctatgaagaaaagaattgcagagaaatcgcgacaggccggacttgacgaggatatggatgtggaaaaggcattccttgttcctgctccacccgatgtagagtggtgggatgcaagattggttaatggcagcgactatgacgcaattgataacccggaaaacatcaaacttgataccctcaacagctatgtccagcatcctatcgagctcgaacctcctcaagacaagcacatgcctgcacagaagcctatgttccttaccccgaaagaacaagccaagattcgacgacagcgacgcatggcagatctgaaggaacagcaagccaagatcaggttgggactcgtggaagcaccggctccaaaggtcaagaaatccaatctgatgcgggttttgggcgagcaagctgtgaaggaccccacggccgtggaagctcgtgtgaccaaggagatcgcagatcggaaagcagcgcacgagcaggcaaatgaagaccgcaaactgaccaaggagcaacggcgcgagaagttggaagctcagaaagagaaggatgcctctttgggcatattccaatctgtgtatcgaattgacagtctggcgagcggccggaaccgcttcaagatcggcaaaaacgcagaacaaaataatctgacgggcatgtgtgtcatgcatccccggtttaacctggtgatcgttgagggcggccaacactctatcaacaattatcgaaagctgatgctgaaccgcattgattggaccgaaaaccctggatccgatcgagtgcctgcagacagccctgaagctcaggtttcctggttgtccactgaagatgataagggagagccccgggattttagcgcgaacacatgtaatctcctctgggaaggaccgaccaaaggtcgggccttcaggaaatggttcggtgctcgtatctgtgagaccgactctgctgccaaagcagccctgtcccgagccaagatggagaacttctggacactcgcgaagagtgccaagccagctgaatattaacatttcctacgacagataatcaacgtctaggtttattgtacgtctacagatagcgaacttgcttcatagcctttgtcattgtcatacatgatccataatacttcaggtatttactgtttgacactgtaaatcattcaaaacaagcactcaattagagctatggaaaactttttaaccacccacataaaccacgctccgtatgcaaagccgatgctaggatatctatcatagaagaacatgtatgaaaaacaaagtatcaggaaggaggaggaccctgatttccgccgctcaggttgcgtagcagatccagctgagctttaacttggtcaaagttcatagctggattttgggcctggggaggctgatgctgctggggctgttgttgaggctgttggtaatgctgctgagactgttggtaatgctgctggtgttgcagaagctgcaggaattgttgctgctgttgttgttgcaagagagccagggattgaggattgaattgagcagcaccctgctgcatgttctggaaattattgggctgcggttgttggaaggctggatatggggagaactggaaaggcatctgtggctgcgctccaccttggccgaattgcggctgttgcgggttctgggcttgctgtgtgtattgcgcatacgcggcgaagggctggggcatcccgtatggctgctggggttgctggtacattggctggccgtaggtagcagtgggttgcgcttgaggctggggctggggctcgtggattgagccgctggcctgctggggccggcgatcctggtcccactccctccctccgcgtccacctctgcctcgtcctccacgtgcacggtcaccccgaccacggtcacctcggccacgacctcttccgcggaacccaccacgctcgttgccttcaactggtggctcacgagttctcatcatctcgtggaagttggtagggcgtgcaagaggggtgtatccctcctcaccgccagcatcgtcgtagttgagctcggtctggttcaatttggaaggtcctggggctggcttcttgcctttggggccttctctggcttcctttcgatcaagtcgtctctgcttcagtttccgcttgtactcggcttctgcttcatcatcggagaattccatctcttcggcggcaacttcctcgtcgtggaagttagaagcgtcacttcccttcatgcccttgagcggctgggtgaagacaaaggtggagtgtccctcaacatagaagatatccttgcccttgactaagcccttttcttgaacttcggaggctgtggcgtatgtgacagtatacagaggattctccactctgcccagggtttctgctactacaccaatgatctggcgatcagcagagcagagcaaggagcccgactcaagcacctgatattctccagaggtattagcctcgataagaacattgttatcgatagcggcatgaactttgccgaggaacacaatcttcatctcgggggtgatcttgacgtcagggacaggcaggacctcatgttcgatctcgttcgtggtccgcagttgtccgcctggtttccccttgccatctccctcgtcatcagagccaccttccgcccgcatgaggatctgcgcttgctcctcggcactgaggattgggtagtcttcatcgtcgctatcgtcggagtccgaggaatcggagctgtctgaagatgactcgtacggggaagagtcgacctcccactcaggatgttcctcttcttcgacatcgcccgcctggccagtggcttcgatcatattgtcttggtggttatcttgcgcgacatccatagcttcgctgaggggagcagtgggctcatttgtgaaatggttcgcctctgtctccttcttgatcattacttcggtgggctcgtgctgggatataagatggatttccgcttgctggttttccgtctcgccttcttggtggtctagttgatcttgctcttgctcttgcttgattgtgtattcggtcaaagccgagccggtttgttcgtcggaggagtgttgaataaggttcaatccggggatatggcttggcttctcagttgtgctatctccagcattcaggctggttgcgccgatgtcttgggaccctgcgataggtgtctcgataagacagggttttttcgaggcagggccttcaccggcacctgtgctgtcagttgcagggttttgatgtccatccatactaaatctccaactcaaaaacttattgcataaaaaccagttcaattcgaaagatcaaaagccggacgggaaacttttttttattttgccatactctgaagggcggtcaacaatgtcttatcggttatcggttatcgtagctctgtccatggatgattgccttgcgacttaacttcaacgtacaagatggcaggaaacgacaatgccctaggggatgcccataaacctcggacaaagaagcagtatgttcatgaacctgtgtgaaatcaaacatggtgctaacctatgtatagaccgccaccagctcccttctacattcccctcaacatcactctgtacatattcctagttgccaacactctcgccgcactgtactctccaattcaggattgtgatgaggtgttcaatttctgggaacctacacattatctgcagcatggatacggtcttcaaacctgggaatattctccggtgtattctatccggagctggctctacgtgtcgctccatgctgctgtaggcaagatcgcatctttggtggtccatagcaagacagctgaattctacacaattcgcctatctcttgcatttctgtgtactgcctgccagactcgactatactctgcgatatgtcgtacactcagtccccgcatcggtctgttttttgttatgatcatcacactcagccctggcatgtttcatgcttcgacagcctttttgccctctacctttaccatgtatatgtctatgcttggtctggcatcgttcctggattggaaaaactgccgaaaaacagcgaagggcatcatgtggtttggcctggggacaattgttgggtggccgtttgccggtgctctcattgtccctcttttagctgaggaggctattgttagtttcatttctggatctgtcggctcactgctgtacaatgtctttgacggtatcactcgttgtttgtcgatcctggtaggtgacttcctacttggtttcaatttctttactaagctgtatcacaggctctagaagttgcggttgactatgctttcttccaaaagctcgttctcgtgccttggaacattgttgcatacaacgtcctgggtggagaaggtaagggaccagatatctttggaactgagccatggactttctatattcgaaacctcttgctcaacttcaatgtctggtttgttctcgccatgctatccgcgcccctcctacttttccagatcgtcttccgatcgcacaccgcctccttgcaaacctcattgcggtccatggccctggtcgctccattttatatgtggttcgggattttctcggtccagccacacaaggaagagcggtttatgtacccagcatacccgttcctggcacttagcggggctttgagcttccatatcatcctaacctaccttggctccactaacaaaaaggagctgatcggccgcgtaccaactaaattaaagattgctgcagctatgtcagttgttcttgttggtctgaacgctggcatgctccgcactctaggtatggttacggcttataacgctccattgaaggtgttcgagccactacaacgtgtggatatcgcacaggcaggagactcggtgtgtttcggcaaggagtggtatcgcttcccgtcatcgtatttccttcccaacgacatgcgcgccaagtttatccgaagtgaattccgaggactacttcctggcgaattcccagatgcgccaagttatattgggcgtctggatggtgcctcacagattccatctggcatgaatgatctcaacatcgaggaccctactaaatacgtaagtgtctcaacgtagccttagaattattataccctattaccctatgctgactttacaacaggtggatatctctcaatgttctttcctggttgactcttacttccctggtcacgacgcaactgagctagagccccattacctcctggacaaggcgcagtgggagacgctttcctgcgcaagcttcctcgatgcgtctcaaacaggtcttttaggtcgattgatctggattcctgatttcccgatcatcccagctcgctttcgacgcaaatggggcgaatactgtcttctccaacgaacagtcgcaggccatgtataggtcttgaatccttctagataaaacctctagaagaattatgtaaaaacatcaacagtgaaacattcactcgcatcgagtgcaaacaaataagtaaacaagaggttatcaagtacatgcgtagcttcacctttcccaattagggcaaaatatccctcaacttttagcttttctccgcagataaaccctgactccgcttcactggaggccaacaacagacaaaccaaggacaaaattatgcagtcccggatttgacagctcgaaaaggacggtctctattcccagccacattggcatgttgaccaaagatggactatctcgtatcggattaacacggcatctcgcatgagaggaccatctgggcggttaatatccttctccgcactccagacttgataaggctttgcatttactatatactactaaagttcctcgacttctatcctcaatgtatcctcgaactggctactgcctaaaactactctgccatgaccatgtcggtacttgagtccctatggggaactatattatccatcccaacgaaacaggccgtggatatctttatcattttcgctgtctgtatatggtttattatcgtcgtctcacggaaatgggtttctagtacgaccaaagcctcgaaaggtgatctagagaaacccgtgcgaggaaaggtcactaggccacctggtggtaagtaaattcaggatggtagttcatgcaagagaaagtctcactaactttctgtagaatggactccatcggacttcaaacggccaacagcagccccatacgcaggatgggatgtccactcgacgaagccaattccctaccggccgtttagatatggcccgtaagttgaataaatcaatagagatactgctagccgtcttttaacctctcctcgcagaaaatactacgtcacactaggtttaagaagcatgaaatgggacgaatggatcggtgagtcgttcttcgatagccagatctcagcagcccattgacctcatatacccggaacacagagctcgacaaccactatctcaagtaccacgccgacaaatcacgccgcattgaagagcgcggcagcaaatgctgccacaccgcaccagaggcaatggatgctgcaattgaactactggaagaactgtaagagcaatcaaaacatacacatccctatccaagacctcccctaactcctctcaccagatgcgcctacctccccgaaagatacccaagcatgttcaccaagaccgcaacaggaataaccaacaaagtaacctacgaaaccttcaacataacccaacgcccactgccagaagacccaatggcaacagccgcccgactcgtccaagacgacctagcactaatgatcgagcgcccagacggcgaatactacctcctcgccggcgcagtcctattagcgggattctggcgactgagcgacaagttcgggatgcggctctcagaaatccacacatcaggcgacgtaccgcagtacaagagcaagctggaaaaggggatgctgaatttcttccgccgactgcggcccgaagagccggttcttcggaacaattatttcatccaggtcgacgataacctggcgtggtcgcatagtattgggcctgaggatgccgagacggtgtcgtggaatacggcggagaagaaccgggcaattgagaatcatttcttccgctccgagaggcagtcgctgagaagattgcccagatctggggcggtggtttttaccattcggacttattttgagcctgttattggtattgctgaggagccttatgtccctggccgtttggcggatgcggttaggagctggggggatgatgttgggaggtataaggggaaggagaagtatcaggatgttctgttggagtatctggatgagaagcatagactgcaggttgagggggggttagatgttgagaaggaggatgaggttaggaggtatcctctttgaatgcaatgtgaatgtggctttttatggatgatgtctttccttattcgagtattggcgatattcctttccaagatcaggactattagatgcaaatattgcaatgcctgatcctgcgcataatcaaaatcaagaatatgacctccggaaagatgacctcaacaggcgcaatatgatgtacatagtaaaagagcatgctcagtgctaaccaactgcatattcctgcacttgctgaatgcaacaaaaaagcaagtctcaactcaggctcaaacaagacagatcatatatccgcaatgggcccagctctccgacctccaccccgtctcgcataagccatctcacgctcctcgcgccaagagcactcatcgcggaactcgcagacccgacatttccacgcatccatgatatccacgccaacgggatctcgtttgccgcgccaccaggtcatctggtcagctaggtaggaggtgagggttgtcggatcgaagaggaaagatcggcttccgatgagctgtctgtttaggtcttcatcggggacagatgagagatatctagccgtaagcactggcgagaggagggttgagtatggttccaaaagctctggctgggaaagtgatggaattgatggtgcgacggattgtgtgtcggggacatcttcggggaggaatgtgaggcggagttgctgtatcatgagactccaaagacgggagaggttgttatgtgttagaagggtatcgattgagtcctggctagcagtggaaggatcccggcactgttcggattcttgggaggaaagagcgtcgaagaattggtcgttcaggccgccgacctccgaaacgaaggcgttcgtgaagggtttctcagcatcgaagtcgtaacgagcggcaaggcgatcgatagttacatcgtcgctcgtgatcagccggttgagcatatggtagtagagttgcagctggagaagagttggccggaaccccgtgcttttgacattcggtagtgatcggttacccttcgtcttcacgtctgtcaaataaatccggcgcaggttatagaccgccgcaggcaattctggctcagtgtgccccgtttccgcggcttcactttgccccagatccgaaagcttcatcccgccttgcgaagaagaaagcaaaaagtccgacaaggacatctgatactccggcagcgcagcgcgcgatgctacagcgtcggcatagaacccagcagcagtagcctcaagctccgggttgggacattcataggacaactgatcaatgatgccattaacaaactccccatcgacaacgccccaaacctccagctcacgcgtaacaccatactcgcgcagcatgcgcagtccctgtataacattccatatcctgagaccccacgcgtcctctttcgtcgtgatttccacagggacggtagtgtagatctcatcctcgagcgtcttgtgcatggtactccccctcttcatcgcagcggtcctcttcttccgcccatgtttagtcaacgagaaccagtactgcagctcgcaccaagccggcgagaccagatccgtcaccgaaaacgccttgttaggtgcttgccggaaccgttcgacgggggatcgagtatcgagcgctgcggtgacaggatcttgctgtgtcaattcgagcgcgcgcgctgcgttgcgctcgcgttctctttctcggccctcagttgaatcagcggtctcgactaaacgcttcggagaagatgtcgtcagctcaattcgggttggatgtaacgggaccaatataatgggaatgggaaagtgtggatgatcaacggcgaagaggaagaggaaaagtagagacgatatagcataccaaacgggctactcctgttgctgttgccagcgcgcggatctgacctccccattgcactcgtcctcgcaccccatctagccgtctgacccggtcgaggctgcgactgccgccatgacgagtaaggctgttcccggcccagcaccttaggcagccgagcgctagctggctcaatgccatcctcgacatctgcaaggagtgcttctagagcttccggttgcaatgactcgagctcggcgagtcctggggattttggtgcggtgatgtgttcgatcggcgttggggttgagggccaggttgatgtcgagatgaaagtggcgtcggcggtcgcgtgttccgcgacggctttgtttaacagattgttcaacagatcctcttcatctagagtgaagtcggatccgtagtcagtgtcattatcatctctctctaggcaggacatgcctgcgacgggagggaatcataacctgttagatagagttgatgttcgggtgcgtcattgcgatgttgagggagctgccttaagaatcccgttgttcttactggctggccatcacgtacttgataatagagatattggataactgtgacataaaatttaaatagcaaaagagactgaagtctattgatctaagtaattgctcttggtatcccatgcatcgctctaaaacagaagaatcccaacgccaatactccgcggggatctatctataaatgtatacctccactcagcctcaactatacttccaggtctactgtccacgcattcatatagtcccagcagagatcatattccccccagaaacaggatgcaaagaaccagcacccatgccctgcgcctcagcaagcgcctcagcagccgcaacctccctagcagccttcagattcaaccagttcagataggtctgccagccaaccgcaatgcacccagaaaagacgttccggaattgcgccggcacgtacatgaagctgaacgcagtaacaatcggccagagcttaacgctgtttttgatactaacagggagagccttcttcacccgctcccacgtctcctcgaacgtcgaaccagcaagaagagagtgcatgctaaagaagtacgtgttgaagacaggagtgaaacacgtctgctgcacgacgactttcgtcaggatcgagaggaatttgctcgggtagttgaaatggttgccgaggaacatgaacctgagagggaagttatatcagttaacagtgtacaatacgaatacagacctctccactaatatgtaacaatctaatatccctggtcgcatgtcgcacgtcgccataatcaaatccgcatcacaaaaacataccagtgataagttggaatactcgacgcagcgccaacacacaaactccgcagagtcctaagcggatcataaccagcgctcacagtctccccttccccaaccccagccgtatccccatcttctgcgtccgatttcgcaggcgcaggaacctcagaaggaaacagcatctgcgcgctcagatcaccacacaggtatataacaatcgagctccagaactgcgttgtatacggcttgcgatcttgcgcgcgcgcgtaccatctcccaaacttccccagcggaccggccattaccaccgcgcggaagccgcgacttcgcgttggtgtggtcggtgctccggctgcggtagcggcaggggctgtgtctgggcgcgggcgcaggggtggagttgggtggcttgaatggtgcgagtgcgagtgcgagtgtggtgggtgtgcaggtgtagcatttctctctgctggtgtctttcccgtagaggagtccgagttgtatcggtgttgtgggcgtccgcggcgcaatacttgcggcttggatatgggggttatcggtcggaagggggttgagggtgaggttgaggcccttggtaagagggcatttcggagggggttcatgaccaagacctcatatggttatttgagtgaggatagttgaaggtggaagtaaagaaaattgtgagtcaagaaacaatggctttgaaatccgacctcggggattgtggcgataagagccgaaaagcgggggaaatgccgagatcagtcccggatgcggttctaattagggttgggttaatttgtttacatttaactctattcgtagaagatatatatagacttgtagaaaaggcgtccgaaagtagcctggtatgtatatgtatgtatgtgtttcttaaatcaatcccaaactccagctatacaaatgcagcccataaaaacattagtcggatgaggttaccctcggtgatatgaacgggtatcaaaatagaaacaaaggtataacacgcaaaaagggcacttttagtgatcccaaagcaaaggggtcaatagaaactatgattagtgacacagacatgtataggtatgacaagcccggacagagatggtaaggtgagagggaataaacagctgatcatcagccgcctattgcttgaaggattcacgggtgttgacacggtcgatatcgtaaggatttccctcatacgtaaccgagcgagccaacgaggcaccagtgcgaatagaagcaagggagtgcgcacggctgcgaatgcgctccgtattagcaagttcttcaacgccgtcctgggattcgctggagagtgaaccgtcgggcagagcttctgtgcggtcgtattcctccttctcatcttccatcggttctggaatggcctgttcctggatcttgcgcatgaatgcctcggactgggcggcgaacttgcaacgggtgcggatcgcgggtccgtatttgtagaacaggaatgggaagggcacacaggcgagcgccaggaaggccgggatcgatgaggcccagtggatacccaggttgttgtacatgtaggtggtgaagagagggaaagcggcaccgaatagggaacggataacggagttggcggctagcacggaggcggcgaagatggtgtatgagtcaatgaggtagttcatgatgctgaggaagactaggaccattccgaagccaaagggaacgccggctgcgatgctgaccatgaagtggattgaggggtagttagtccatgcgaaccagaatagaccgactgggattgcgacggatgcgacgaggcaaggcggaagacgtgcctccgggggtgcgaagccattatatctgtcggatacctcaacatagcgcttgttgtcaaagagggagtagatgacggcagacaacattccgatcatgatcccgaggaaggcgaggccactaacaccctggttccagccacgggactgctcgtagacaatggggaaagcggcgaacatcatatacaaggtaccgtaaacgatagccatgtagagagacagcaggaacacaataggctcctggaacaacagaatccaagggcgggagagcgacaccttgaaagagtccttaagagagaccttgccttggtcgatttcaatcttactccggtagacctggcctgacagctttgacagtctctccgcacggcgacggagtagcacgggcgcataggtctcggggatggtcagagagccaataatccaaaccgtaccagcaaagacggcaaggaaacccatgacccattgccagccaccgtcactcataccaatgaatccaccagcgatggggccgatgatagggccgaggaaaggtgcagcggcgaacaagctcatagcgatacctcgctgtctagcggggaacatgtccgcaatgacaccaccggcgttggtcaaaggcgaagatccaaatgaaccggcgaagaagcgaaggatgatgatagaccaggcatttctggaacctgcgacaccagcattgaatgccgtgagggcggcgtaggtaccaatgaacagtacttgacgaccaaacagctcactcagtggagcccagagcaaaggtccgatctataccaagcaaataacgttagtatgcatgcgaggcagattgcgcaagagtaaatatctaaaagatgagatcttaccgcgaaaccgagaacgaaaagcgaaacaccgagagtggcaacttcttgtccaatgtcaaaatccaccataatctctcgaataccgccggtataggcagacgacaccagtgaaacagccaaggttgcgacggcgaccagcatggtaaaagtccatttcttcacctcgctaaagttcatgggattgcgagggtcgttgggaagccatgttactgcaaaagggtcctcatctgttcctgaaccggggtatgggtggtcgatgatctcttgtgtgacgacaccttggtcaaagaccaatcgccagtatggaattttcgttggggcggaggactcgatcttgtccgagacctgagggtctgagtcagctgccatggtgggcaggtagtgaattaaggtttcgatatatagtcgacagtagttgagtatgtatttgctaattagaatgaaaattgcgtgggttcctgaagctatgcgggggatagaaaggttaaggaatgtcgaaaaattagtggaatgagaattagatatggacgtcaactgccagctatatataaagggggggttgtcaaatttatgaacgcgatatatgcaaataaagtacggataagtggaataagtgggataggtgggcctcggacccgggcaagatatgatccgagaaaatttgcgatctggaccccaggggctttatttgatattgatttcatcctgatttcatgcctaatccgtacatacctctcagactgaattgaagggctatgtgtcgtacaaatatgagtgttcagatgcagccctggaggcaaggcgtacagtgctctcgttctgtttgcagccacgtttttgcgccacgtgatttatgcaggttttatgtcgagccactcgggtatgcggcatctatctgattgggtcacttgaccgcaagtttcagagcagatcaataagccaacgaaaggttaactacgggtttatgatcctagctcttctattctagtctagtctattctgaaggttcgatcttgttttcgatctcgtatctctttacatcacggagtactccgtgacttttctaataatgtacagtagtattgtataccaataaatatgacaaatacacatggtcatgcataaccctcggaccccgcccacattcggacgttccgcatgggactcggtacctaaccgaagtttcatccacccgtagacgttccaaagaacagatcgagaaccgatctaaagatcggatattcatggcaatctccgatgcacgtacataactatttttttatgatctttatcaccactatgaccgattaactccgtgtacatacatacttcataaacacgaacagattctgattattcatcaaggtcaggggtctgcataccagattttaggaccccggatgcaagtttcccgatcggggtggcgccgctttctggcgcttagggtcctgttcactgaatatctgacgacatgattacaacatagggtctttgttcagtgacacttgattctggacttcaggtttatttattgaggggatcactggtttcgaattaattgagtagttaccccggggcctcagccttaataactactggtcagttacctgattaggttagaggaggcttaacattacgtaaggcgcccctctgttgggtgccgaaccttggccgaactctagagatatagcctttttagcctcaccttgtccttcttttccttttttttttctttttttaaacagaggtacgtacctggatgtttatatggttcctagccagaggtagaaccttggaaccagacctggaatgccttaaaatatgtgtcatgtcagtcggtactgcagatcacttacttggacgaacttagatatatatacatattgaagaggggaccctgccacgaaggacaggggcaccgacagacctgcctgcgaacaggtgtgagagcagagttgtcactggtagtagggtgctagagaggagaacaccatggggtgactactgagaagtgaaggtggaaaggtgtctgcgttgctcacatggccacttagtcatcctgctctggaaacccccactgcaatatatgatagagggtttcagttcaaagggccttggaaagatcaatctatggagaacaacgtctaaaaatacggaatctttcctgactctgctgtaaatctacgaatcttcggggttttttcacacctgtgcgaatcctttctgttccagcggacaacatggctgatattgagcctcttcgtacatgttcttgcgacagaaacgaggatgatcatcaagcgcccgagagtcaacttacatctgtgcatcaagctgtcgtcgaagggaatatcgagctcctcgaagtgctgattcgggatggagccgacatttctactacaatttcctcccgtgatttcacggcgcttcacctcgctgttcaggggggtaatgaggcggccacacgacttctgattcacgccggagcgaatgtttctgcgcccagttatgacggcgtgacaccattgcacaatgcagctgctggagatccggtcgcggtagctgaattactcgtcaagtctggggctgaaatcaacgcacggaatatcgatcacgaaacaccattgcatgtagtggccttgtttgggaactaccaaattgcaaagctcctgattgatgttggatccgatatctcagcaacagagtgctacgggaacacagcgctgcacattgctgccggccgtgagcatctcgagatagttcattctcttcttgaggctggagcggacgtgaatgctattaacaacaatggagatcccgtgctacatcatgcaggcagagatgatccaacatgcgttgatctgcttctcagccatggcgcagatgtgtatatgaaaggtgagggaggggacactttcttgcatcgggcagctgaaagctccgcggaactagtgcgtgtcgctcttggagccgatgccaacgtcgaggcaaccaacgatgaaggaaaaaccccattgcattctgcagctgcgtatggcgaaaagcaatcaatccgacttctactcgatgcgggtgcgaatgtgaatgcaaccaccaaaattggcgagaccgcattgcacctaattgctggcgattcttcaatagatgaatctgatgagaaagcaaggctactcattgatgctggtgccgacatcaacgcgaggactgtatcgggacaaagcgcccttgatcttgcaaaagacagcaatgctacagttatacaagtactatgcgaaagatagaaatcaaattggtagaatcatagtctcagtgtcgcaaatgaagtttacactagacaaaaaacatcaagtcacctacggagacgaccacaacgaagcaggattagaatcatgaaatgaaggtagtgcggtgtcgcatgacgtggaagactgtctttgacatgggtggcctgacctatgtctacatctattttcaagcagctagtgctgcttcgggtgtctattcgcttatagtctgactcggcacttgacattcggatataccctcgggtccatgggtatctagagcgctggtgccttggcgttgacaagttccaaggttggcagagttggcaacggggcctgaaagtttaacgatatataactaatcttcgtagctccactagttatgccctgatttatttatttgtaaatttttaaaggtgacatgagcagtcaaaaaataatagattctctctcgaggtcctctccaatcagaacatctttaccaatctttgacaggactagctcgcatgttgtaggcggagctcctcccaggaagagtcatccgctggatcaaccctggaagagccccttgtcctctggcactaccgagatccactctttcatctggcgaatatccgtaatctcggattgcagacgacctgattttgttcttcattttcgcatgcttagagcaaatatctatatgggagattctatcggttttgacttctcataaactacaggttacttctctccaatctcacattgcaagacatgggatatcacaccaggtctacgactacaaaagatacaaaagggtcgatatcacaaaccggatcaacctattcaactaattctgtcgacggaatgggggacaaaaacgaacgaccccatttgctgcaacagtgaaaaatattctccatgggcaaatctccctttcagaacagtccttctcttcaatactgcggaagatccagatttgcaaagaagagacattgaataatgcttggctgcaatttcacacggacgctcggtgtcataaggaagagggaggctcaccaggaagaaggcaagtgaccgcagacaggtcttgctatcccacctgctatgataaacgtatgatccatatgaaaaggcttttcaaagcgacccgaagttgctcgtctcatgtctggcatgctatcaagaacaaagtgctgaatgcggcagatctttgcgacagagatgatgttcttccactttccagctcctgcttcgggtcatcctcgttctcaatcgatctttaattggtctcgctcgtcacggtaaacacaccatgagccataagccccaaggaaagcgatctcaagactttctacatcaaaggtgtctcccgtattgaggctcaggtggtcggggggttgaaattattcaaaagccgtcgagctgaaacggagttgacattcctggtgacagttcccgcgcactatcccttaaaaggcgaactcactacacatctgccttggtgttctatatacccagcaccgtgataatcctgctctgcgcgttgggtgtcatttcaattcgatataaaaatagattgtagttcttgaataggaaccaaattaacgaggaaaggctgttccagggaaacctatataatctcttctttggccatttactacctcttggccagtccaatcactaggaatgaaattcaaggctggtaaaagtggtcgatttcttgagcagatgaaccatcaaaaatgccagtggacctcgggagcttccatctcccgattgacatcactcatgcgaccaatcagcggtgaaaatacctctgtattgtatgtaacagttactatacatatcgaggggaatcgaggctagaattttccacgtgtcttagcgccttctttcttgcctcaggccaaatagatccatacctgtaacgaactaactgactatgtatggatccaccgaggatggatacatctaccacgagactatatagccttgatcttagtacccaatatgtctatacgtgtcaggctctagcaatacatgcttctcatcttcagctacctccttctctcatatcgaggcctttccggctatgtgggaagtaagatcaaagaaacaaaacacgcgttcaagtcactctgtctccacttaaacttggcatgacagctgggatccataactagatacggagtacggagtagcgtcttcagccttgcaaaaagaagaatctttgatttttaacatgcagaatagatcacctgttcacagtaactgttatatcggtgttttcatactaaggatgcgctccaggtgcctctcgtctgcgtatgttgtactgggcttgataccaggatcggcaaatgtattcatctgatctactcattgttctttcgagttcaggattggtcatatgatactaccctgcgcagataatcctgttttatatgaacattcctcgggatctgaagggtaatgaaccttacagtactacctactttactacctacatacagccgcctagagcctctatgacacgctgagctcattcaagtctcgcttttgattcgagtcaagtgcttacgtggcaatcaggtttgtgtctggccaggactttaatatggtatgatatgaaccagtcggaaagcggaaactcgcattcagattgcgtgctgtgtgctgtgtgctgttcaattctttgtttggttgcttgattattgtattgttgtattgcaggatttgattgcggacttccaagttccagtcacttgaaaggcaggattaggtcaagatgaagtcatagtcgagatgtacattgagtgcttcggatatgagtcaagtactaggtagtataaagagatgaccccacgttcttgaagcggggttttccaagtggccgagaatttgttcttgtctcagtcagattccattgtctgtttgtcgctgtctaattatagaatctcgtacttaggattccgttgcgcaacgagagaaaacctgccgggagattcggggtgggatcaaatcacctgtttttaggttggtttggaaggaaaggacgatgtccgagatggtatttttttttgcagtttaaccaatttccgatctcattttcgacggtgttgttgggcgttagtactaccgagtgaaaggcaaccttgcgaccgaggacggacatgagaccacaagacccaaagagaacaaagcaagaatacttcaggccacagcggactaatggctacccaaaaagacaagtcggtcgcaaatcacataaattaagatttaccatttacaatgaaagaagtattgaatcaagaagacagcattaaagcgtcttgtcatgagatgatgcgcgctaaggcatcatgttaaagggagcccccgtaatgtacatgcccatgactgatccatcaatcgatggtgagcagtagcatcgataaaaaagcaaaattgcgaagcaacccagtgccgaaacccattgatattgaaagcaaacccatcatgtatcgccagtagtcatgataaaaagataaaaacaaaccccatgatcgcctttcagaaaaccagctcgttgaaaagaaaaattacgagcgctcgccacggagacggcgggccaactggatgtccttggactggatggtgacacgcttggcgtggatggcgcacaggttggtgtcctcgaagagagagacgaggtaagcctcaacggactcctggagagcaccgatggcagaggactggaagcggagatcggacttgaaatcctgggcgatctcacggaccagacgctggaaggggagcttgcggatcaggagctcagtggacttctggtagcgacggatctcacggagagcgacggtacctggagatgaacgttagaaatgtttcaagtggattcgtcggcgacagcagatatgacttaccgggcttgtaacggtggggcttcttgacacctccggtagaaggagcggccttgcgagcggccttggaagcgagctgcttacggggagccttgccaccagtggacttacctatttgcgacagtcagtaaaatgtctcatgtccaacgcgtgaacgcgtcgcccatcctcaaggcggacacccgactaatcaggtatctgcagtgagatgaataaaatatgatagaagtaatacttacgggcagtctgcttggtacgagccatctttgatgatagacttgatgaaaatgtggttttgttgatgaaagagttggttggtggtggatggatgtaaaagggaagagagatgcgggtgggggaagagtatttgtaggagacgggaggggggggattgatctggaagggagccacgaatcagcgcacggcagccgatcaggatcagtcaggaaactcagcgcgtaggactggggactgcgcagcgtgtagcccagagaccgatttgcggtgagctctgattggccgagctggatcaaagtgctggtactgccaactaagcgagaggtgggccaatgagaacgcaggatcagggagtatagaatgctcaacccttgaattcttgatcttgcacccaacctcctttggatgggggagtcatgcatctgagcgtgctcaccatcatttggaatgtataatcctttctttttcctacaattttacattgttggtggcgggtgataccaggatcaaagaccgaccacggcaaagtcggcgagccaactctggggtctcccggcagatcaaggttggtctgtgatcctgcgctctcattggcggacgcgatccctagcgcgtgatttcccaatcctcgctcattcccgtatcatacaaatatcctctgtccacttccgtttcttttccctcttcttccatcaattccatcgacaacctctcaattaccaacttatctccatcccacttctacaaccccctttttcttctaatccatattcaatatgtctggccgtaagttcttaccccacacttccacttctccaacgcgttctaacgcgtctcatttcaggcggcaagggtggaaagggtctcggcaaaggtggtgccaagcgtcaccgcaagattttgcgtgacaacattcagggaatcaccaagcccgctatccgtcgtctcgcacgtcgtggtggtgtcaagcgtatctccgctatgatctacgaggagacccgcggtgtcctcaagaccttcctcgagggtgtcatccgtgacgctgtcacctacactgagcacgccaagcgcaagactgtcacttctcttgacgttgtctacgctctcaagcgccagggccgtaagtttccacgtatcttcccattctccaacgcgtctctaaccttcctcttcaggtaccctctacggtttcggtggctaaatcatttgttgttttcttttccgggctggttcacggtacgacgggacgttggggtgttctctgatttattttactgcaactgtcatgggtctctgggtttgcttttcatatcactcgattaccactattgcgcgtccatagtgtgcgcttctgagcttttctgtatcataacggcctctacattacggctggcaccatagacatggtgggatcaagcacataagtgcgatccgatacgaatacaatcaattaaaacttgaaataattgatgtctgttctgagtcgatctcgtggtagatgtacctgtacgttcttgtttattggcttctattttgtattttggtgcttgccactctatcgtcggtggcttgatctttcggtcttcgcgttgcttgacgcgttgttttgactgcctgaggctggcctcttttccatgcccaacatcaacccaccatggactatattcgttcgatctctgttattgacctagtgttcctagatcttcaaccttctatatgtctattctatcgtagttcattgtgttgctggttcttcagtacttccatgatgtatgcaggcgaccatatacacttccgtaacaattcatcatgcttttttgtagtttgcattcaattgcgtatgctgtgctttattttcatgttccagctatttgaatggctaactcgtatggtttgaagtatgtgtgttgttggaagagtgtgtgtagacgtagatgcatactgatttacaccgcagatatatatcaaaccaaacattaaaccatagagtctcactccgcgcacacaaaggcattgaactcgaacaaaatacacgcagataataaatacgcaagtaaaatactatataaatacttcaatagagccatatagaccccgcattgtggtgtggcgagcgaaacagatctgttacccaagtcgaagatgaaccccccaaaaaggaagttcaaccttgcttggcgctatgaagcatgacagattcggatctacccacaaccaagcggcaaatgcacatataatcgaaacatgcgacagatggatttaatattcagatttggaatagaaatatatggtgtcctttgaatgtcaggtgatggagactaatttatcatacgaagaccgagttgaaccgcctgaaacggaggtccatactttttttgccacccagctgcatactacaaggtcgagagaaataaatccaccaatacatttgaatagaccaacaggcctgcagataatacaaacatggagtacccaccaagagacgaatatacaacagagcactatatggtcaattagcaaccatccaagctagtataccctctactaataccaccacacagaccgaaggcatcgagcaatcaagaataaattaagtatgtcaataggtattttggagtgagactgggagtgcaatataggtattactccgaccacagtaggacaactatggaagacacatacccgaaccccgatagaccaaacggagtctagctgatatcaccttgctgacctccaactcgcccacccttggtgaagctgacaagacttggtcttctcattccatctattcccacccgcgagatatcgccttggattcaactgtcttaccaacaagctgctttcgcaggagtatgatataagccccaggctaggccgtggtatcaatgattttcccagttcattccatagccacggcattcccagtcggctatcttctggtccatcatcgccacagccaagtcataggaaaactgtggaattgttttcatcaaaccgtctgggagtttcaacggtagagatccctgttcggaccaccgcctcatccttcccaacagcatcagattgtccatggtcagtttgattgccatgtcttgcaaccctctatcgctcccgggtgttgagttgtagatctcagtaatcgcatgcgtgaatgtctccaggtttatctgtcgggtcagctcttgattggccttggcctttgagagggacttcagtccttcaatgaacatccggtctgccagggagtacatcaaaatgtgaaacgatagggtgtcagatatgatcgctggcctcttggcttgttcaagaatctccatggcatccgagtccggtgttggtttgtgttgatcgatagagatgtctcgcgctgggcagtgaacttacgcccatagtccaggtggtagagatactcgatcatcccttcaaccaagagcggctcttcttgtagtacgaccctatttgtgaatgcctccttggttatattagtcgaggtgcaacactcatatgttgttctctatcttacctggaacccactgtcacaggctttggcaaagaaatccgatcgtgggcaaagtatgcacttgtgcacggcatattcatcgtctcgacacacaatgatcaggtcactgtatattggctcaacccgtatgctgtgatgacgttgattgtctttctggtctctgtggtagtatctggtacttttttaaggcgtccaaaagctccttggcagggctgaaatcttcattctctccaccttgatatgtagttcccaactgtcagattatcctggcgcaggtactctcgtccttcacatcgacgagacagtggtgagcgttaggtgtgggacgttcagattttattctctgcgttgaggttactgatgaaagtgagtgcagggtgagagatcaagagtgaaggatggtggggtcagctgatgagtaggtctgcattcttttaagagtgagagtatatgtgcaagttgatgtttggttacctggtctacctagccatcccaataaagaacaagaccaggtaagaccataacagccagacgtgctggtgaattgctaaccttttaatttgtctagagcctgcgtgagatcttgaaaaaaaaataaatttctatagttagtgagtggaatgaaaaaaaaagatagacatagcatgtcctggtttcgatccagggtcctattgtgagttagtttgatgtttgtgagtcaaattgggttcggtgaaacgtacctccgggttatgagcccggcgctcttcccctgagctaacatgctgatgacgttcgtgagtcaaattgggttcggtgaaacgtacctccgggttatgagcccggcgctcttcccctgagctaacatgctaggatgttggaaatttatttcacctttgacaacatagaccaagatatacaagagagatcttcctagaaattgttcacttagatatgatgagttctaacttctgtttaaagggctaccggtataatggaactcgtctacaggaactctggtgtctgcaactggacgtcacatgtctattgtttaccctctattccctattcatggaataaagttgccttacagcttactgcctcattgccaagatggcctcctgctcattgctggctcagataatttcagtaactacatgtccttgtgtcaccagggatacagaaaggtctctgcttccggagggtcgatgggtcatcagagacaacgctgaagtgcagtgcatacagatctcgtcgatgccgaataccgatgagcgtaagtctgcgttcaagagtgccgaggggaactggcaccgaatacattccaggagtgtcacgttgcgacccaaagttgcatactgagtgatactggtcgttgccgtgccaataaatatgttctataaatggctctgtatatacccggccacgtgctctctatagtcaacctctggccctctgggagctaatcaatagtcagatatcaacacagtagtaagtcatcccgttcggtaactaaactcacaatattgctctccacccgttgtttgtcctgcaaatatatcatctcgccacctcttcgaagcgttttgctatagccaacgagtgtttccaacttataacttggagtctggatgttttcgatctccttctccagcgatcgggtcttttcttggatgcacgagagctaggctggtcgactgtcagatgctttgccggtgtcaggcttgatgtcttccttgcaccgtaccttattgtatcttggtacaaccccgttggattgaggacatggaagcatgcgattcctaccacatttggttccgtaattcatatataaatataaatagaagtatgacgagccagatcaaggggagtgcttcaattcagcataaccaagacgagagagaaagtacagaagtgggagagggcctgctgatgaacgtatcagactacgcaaggaggaagagaaatgatcaagtcgaaagtgacaatcaagatatatagaagatgataatctagccacacttctgaagttctttaaatagcttcatgattcatcccacaaagctctaaagatctcatcctctagaatctaatagaagcatctctgcaggcgaagtaaagagaccaccgacgcagcaagctgaacgccaagctgcctgcgagaggaaaaaaagagagggaaaaggaatgccaaagagaggtctacaaactgcttggggtaacagtgaatgtgcccaaatgcatcaatagctggccacttctgcaaaatgaaagaatctcttgcttatacatcttatctacccaccaactagctgggatatttcaagggtctatcaaaagcacaatcacaagcaactaacctgtcctggagggtggctcatgggtgcttggtaatcgatggaatcctagagaatctatacggtttgagtatcagacagaaacacgacatagccactattctgtattataatcggagacatgtggcatttcggaatgcagggatagatcgtggttaggttccaaaattctagaataacacgtgtacataggcatcgaagtgaagaatgtgccattccttgctgtcatgagttgcatagccacgactcctttcccagcaaagctccttggagccttctttctaagttttcttgactcaaagtaacgaagcgcatagtataagcatacgcggccagcctcgaggatttaagacagacacgtcatgaatttttgaaggtgccaaggtgtgagtcagaataatcagtcagtgttggtaatccaaaatgccaaaaatctaaatcatcaataacaaaacgcgcaaagcaaaaaaaatcttgcatctgaaaacaggagcatggtcctccgacaatgtcggcgatgcccggaggccggcattccgggacgaaaatagaaagcttccagaagaacgaaaacaaccacgctttaccgaatgcaacactagcggcatgcaaaagccactgaaaattccttctggaacataccagaaataccgaatacgattacctgcagattgtggctgctccaagtgccgtacggtaacagataaccggaaaacttgaacggcgtaacggcagtaccgagaagtggctgtgcagccctagcccagcatccaatcatttacattgaaaaacttttcgctgctgcattagctcgttactaaatatgatcctgcatgacaatctcgcagacccatcgccgagaaacccggattaaggtgctgacataggttttatggtcgggattgcatgccggtgaaaaatttttctccgtggtcgtttgagtcttatgcaggggccctctattggtaatgaacaggatcgatgcctaattgagaaggaggttaatgtacatcgtaaatcatggtgccttcggaaggataatatatccccagatcttatacattccactataatctgagtgggccattggatctggatatttggatcagctgaggttggtttgccacttccccagactcggtaggggccacgtttcggtgcaccctcgaggaatccgccaagaccttccgggttttgtccacatgggaaagggagatcagtcgggtttgggccagactgttcggtaaatacggcagaccccggacccgagttcgcgcgtccagaccgagaaaatggaacctgccggtcggatttatttcgcgctagtggatttcaaagggagatcctcggggggtcacatggcatctggtggactattgctgcggcctctgttcttgcgcctacacgagatccaagctggaaacccggggtttgccggtgctgctcggttcggaggcccttgatctgcaatctgatgcactggcatttagtgcccaagccatgtgcatatgcacggttgaagatgacagcgctagacagaaaatttcgaaatgtaatccgcagtatccgtacataccacgctacccatggtgttccgcgtgctacaaagcccgctaacaacttagcacggagtatcctggagggatccgatcaaatcaaatatgtactctaattttatcgcaacaatttttgagtcaaaggggaaaacatatgattcacatgtgatcgagtcatggaatcatcgacagtactccgtgtagaccggaaaattaaggcaatcaccccacagtaaagagaccatgtgaccatatattagagccggatgggattgttgtgtagctcaggttgggcatttcccgccgagcctgtgagcttagtccaatagccaagcgcttggggaacaaatttgagacatggagagtagcccttagcccaaaaataaagtcaaagtaaattaaaagtaaagtaaataaccggtggtgactcaagatctggggtcagctggtcatcaagtccctatacacaaacaagatccatggaccagtttccaaattcagcttatcatgccatgagatgtacggaggatggtcagctgactatcgcgtctgtcgaactgcgagcggaatccgccgattggtgggtagtggggagacatcgcgagacaatcctagacaatcggagtaagacaatcgcaagttgggagaatattatttcgcagccacaatcctgagttatccgaggtttggaatagttgggtccgagtacgaagaaccaagaggaatgtgctttgcagatgttgtgcaggaatgaatgttgggaccgaaccattggacaccagccacatggcttgatctcgatgtggctagtatttacagaaaccttggaagtgtacggaggaactaagaatggacctcggctgaacaacactccgtccatttcgatgttgtatatttctgggcattcgaggagtaatgactcaccggaaatagcacataaggccgaatcgttagttcccaaccaaaattcagttacgcgaaaatggacaccaaaacaaactaaggtgtggctcagccctagggattcctcctcggcatctccacccccattttccaaattatggccctggtcacccgagtgcaaatcggagctagttctagactatgcgaccgattagttgattttttactgtcttttctaagcgatgtcttgcaaaccttggctgaatactcccggaaatgtcctacagaaatttaaaaaaaagtaatccttattaaatatgcagatctccaacaattcccattgacacccaaaagcccaatgacatagaatatagtatggtggagccgtgtggcttttgtataccgaaagccacaaacttcaccaagggaaagagcagatcagatcagtgggactcggtagaaatgggtgtatgtggtgatacgaatccagtcccgatgcggactagtctcgcacttgggtacaaataaaataataaaaatcacgccaaattggtcaataccgtaaatacttgttcggggtcaccgagctagtgaggtcatctagtacaggcgctctttattaaactccaacttcctcccatctttcaacttcattactcatacccccccccaaatcattattctgactcttgagatcatcatatcaagtaagattcgcttttcctccggccgagtcattctccagaaccaaactcacctcaaccatagtcgtctctattaaagttccagccctctactcttaccattcgatcagcctcccgacgtttccagactcttcgctacctcaagctttgaaccaaagtcgccaaaccagacttcttcaaaagcacggccacaattgatcaggaaatcttaatcggatcttgtgccgtcgggttctataaaagctcgcctttccccggtggcgaacacttacccactttctgacgtcccccaacaccgtgataacataatgcttatgtacccacgtaagggtctcatcaccgatccatacaaccctgagggcatcatcatacaagacgaccaatacccaccggatttctattctgagaacgccttgcactacgatcagtctcgtttgcagtcaccgttccagtgccaccccagtgtacagctctccccgccatcttccgcacctccctcgcctactttctcctctccgaccttctcgacttcttacccgcagacgtctgactgtcagtctttcggggctccttcgatgaccccagcgtcttcatataacccgtcatacgacatccagggttctaattcaccatcgcactacctgtcgcaatatcctcagcaatattatacgcccatgctggtacaacagccgctcgctagtaaccagggttgggatagcaacctgcagttgttgagccctgcgcgcatcccataccccggtgtgcaaaagcgatcctcaccctcggcatcctcgcgctcagctcacgcagggttgcccgccaacaactaccaccgccgctcaaacagcgccaacaagccgctacccaccccggtgcaaacccctctccagaactcattccttgcgactccattccaaagtttcgatccctcctcccaagatggtcacaatgccgaggccgagtctgccatgagaaaagcgatcatggaccaacagaagcagtcaccgcagcaaatgcagaacgactactccctggctccatcggcgtcatcgatgagccataattcaccggtgactccgcagactaccctcgatgaactcgacgatgcatccaagtcgatgaccaatggtgagaatcgaatttctgatattgatttatggatggaccagtacttacatttcgatcctccagaatacaatgccaatggtgccatgtcaattggagtccccaagctgaacagaacgatttccgatatctaccaagacgaattgtacaaccccgccatcatggcagcgcctcagatgtccaagccaatgggacagaatcacctcaacccgcgcaatttcattgccgatcgtcttcaagctgctaaccaaggacacttgtcagctcgttcgcaatcgcctggcggcagacgggatcgctcacctttccgtacttcttccccattcgccggtgatatgagtaacaacgctctccagcagccccagatggccaccagcgtccccatgggacagaacgcaatgaatgggttgaacggaatgaacatggaccagaccacaactggagatatcaagactatgtcccccaaggatgcggttttggatttccaagacaacgatgattccatgcctcctctgttccctccgggtcaggctgatttcaacctgggtgatgcgcttggcttgcgccgcgatactggcccaatgcgaccgatggaagcattccctcagtattcgacacctagcatggcccagccacagttcgcattctctgaacctcagatgcatcgccctcagaacctcttgccgcagggtaccgatttcccttcgctcccagcagtggaatctaccgagagctcgcctccaagtcaaatgaatatgtccattacagagagcattcctcgtcccgacaacacgtcttcggatgcgggcacctacacttgcacatatcacaactgcacagaccgcttcgactctccctctagactccagcgacataagcgcgaggcgcaccgacaaactacaccgggcggccaccttgtcagccgcgatacctcgctccgcaactcccaggctggcccgcacaagtgcgaacgcatcaacccgtctacaggcaaagcatgcaattctatcttctcccggccttacgatcttacacggcacgagcatacgattcacactgctggaaagcagaaggtgcgctgccacatctgtaacgaggacaagaccttcagccgaaacgatgctttgacaagacgtaagttttccccttttcgctttcaccccttaagttgatcatacactaattacattaattacagatatgcgagtggttcatcccgagatcgactggccaggcaagcagcgcagaaggagagactgagagcgccttccacgtcatagtcaccggatcggcatgccgaacgtcatcggtggacccatggtggacccactgggctccaccaaaaatccggggcttcgtcatcatgacgattcagctccctaattctcatgaactgtatcactatgcggcttccgattttattatgtgtacgattttacgttgatgatttgtttacatgcggttccccttttagcattggtcggtgtgtttttttcattttgcgtgttttctccctctattttgtgtctatgccatttggccgggaaaacaaacgggttcggtgttgtacatttctgttgtacatggtgttgctgcattttgaccccagtacagtgtgtccctcttgtactatagtacattcctctaaaaaaaaaatgtatattagcttggatatgacatgaatttggaaatgatacatatgtatatcactctccacactccctccgcactactccacactccactgtaatcgtgaaacaccctcttactttgagataatcaagggatagacttgaatcctcgtacccacttgcatcaaacctgcatgtttacccacatatgccagccataactagggactgttttaacaatctatgcatgtgttgcagtcttgcagatagatgtacattgtctgaatgtatcttgtgtatcgtagaccgattaaagttgacaaaaacaccaatgcagcacgagcaaagttttgaacattgcatgttgtatattgcaattaattaacatcccctacggatgagtcccgattcgcgctgatcatatattgtcctccgtactccgctccgtactctccgtattgcatcaacaatagaaattacctacattacctatcaacacattgtacattgtacactgtaccttcaatgccaacaagaagttagaacaagccggacgtgcaagtaatccatataggccaagagtatgatcccaccattgcgtagccggttcccagaaagccttggaacaatcccgcgcgcatccaaactctggcccgataagcgatttaccaccattctggtacccggtactggtgggatttctggtttgggttttcgagtgtcgacgtacaggaattgcacaagcacaattctagccccttcaggattctggtcccatcttttattgatggagttggtattttgaatgcatatggagtttcataccgatgtgcctccgggagtgtcatgccatatctcctatcttttactgggtgtgaatgttgctgtcattatctttggttgttatcgtcattaatgtcaattgaagctattcgagcgttttgtacgtatttgaaactatcgatctgcaattgtgggtatctatcttaacgtttaccatataccaataataagccgtataggtatatttacgttgtgcaccctgaaaatgatagacaagaaatgataaacagggtgatatacatcggtgggtccatggcttgatagctgtgggtcttcaataccgttgtgtattggggggtggggaggtggagaggtggaacgatggtgggtgtgtggctgaggacgaacttctgttttttaacgtaatctgccgtacaatcggcgttcctcatttattacataggagttcgtatatcggtggtgtgatagatggcttggcggcttattttgacttcagttagttcttttgcgatgcaccggtactatatcccttgcgtggtcgcatcatcgagggagtcatatgagatgtgaaacgtgagtcgtattactcggtaccgcccggcagtattgctatctcaactctccctggacttcaaagataacggcctatgctctgtctcatgcatgtgcatgctcgactgcatattttaatacgagaaaaggcgcctatatcactctacacgtgaacgtgctctgatcggctatagacaagtatgtatgaagcattacacagttcagtgcgacctttggtgtattccaacgatatcataacaactctgactctgcatccctcgctcgcatccggagctgagtatctccccatggaggaattttttgataaaatccccattatttccttaatcgttgcggcatctggcgtccacgtcaagctaccccagctccctggcccttcccagtcatttaatacaattcttgttgtgtctatcgaatacattttctcatcactgagtcgacgccttcaggccccatcgctgcctgatcatccggaaatatttcggatcgcttgttgctttttcaactgattctcgatcctgatgcaccattctctacattgaccaaatcccttattgacatacagactcgtcgtatcctccatcattccaattttcgcggagtctgttttttgctctacctacttcaacttaacccacccgtctcattctagtggcctgaggatctgtttccctatgatcctcgagaccttgaaatgtctacgggatacagatattgcaggtgcctaatggagggatatgacgaatgtctctgcagattttgtaatcgatgtgggagttttggtcatactgccatttactgcagagggaaatcccatgggggacgaagtggagggtatctgagatgctcacgccctacaaacgtgacgccgatgaatgatcttgattttattgacgatcatagtaaggtatgtgcgctgttattctaacgcctactcttcattacggtgctgactgaaaagatcccgtctcaggattcgcccaaagcgccgatggccatgacgcaagtgtcaaatgcatcgaaaaaggaccgctcgccacaaagatcaccacccaatgaaattccaaatgccaaacgacgaaactggactgaggtggccggcattctaaatgagactttgaacctaggacccgttgatcggacccccatcctagagcatttgatttcaaatgttcgcctcgaaatgagcgaaaggtactcctctgtgctagaggagttcgatattgctagaatactcgaagacagtctgagcccagtcgtgaagaatatttgtgaaaagggcaaattcgacctgatcaggcaagtttgacctcgaaatgcagagaaaagttgctaataaaaccttcatggtctcttggaaattggacaggatccagaaacgaaaaaagaagctggtgtatatcttcatattctatggagagaggatgaaacgacgaaacggttttggctttacgtcggacaagcatgtgtgctgtgtcttgaggatccggaaacataaagaccctagacatcgctggaagaatagaggtctacactacgcagtgtgggactctgccgtggatatgaaatcagcctttgtcactttggctattctcgacgccccattttccactaaaacgcagctagttctcaacctagcagagatgtggatgtgcctaaaattcccaacactgacttcccttcacctaggctcctggttgccgaaaagcacaaacgctatatggtcgggtaatcatctcaatgttgcattgccattatggcaaggattcactgatactcaagagaacaaagatatcaccgacgcaattggcggcagatcaacctttcaacaataccttacatctgaggattcagttattcgggcatgggcggaacaaaccagggatgcgttcaacgacatacgaaactcacctgaccccgagatcagaaattactggtgggatcttcacaaagagcgtatccttaaggcacaggacacctggggtaaaaagaaagctagcatggctaagcagtacctcgaaggggccaaagctctcgttacattgcattccggaaatcataaaaaccatcaaactgagggtagagctggtagtttcaggttcactgtttcataaacacttgggcttgatctccatgacggtgacgaagttattctccaatatcatctaaccccgactccacacccacacgcttattctctttcggcattgaaaacagatcctgctacccgcttgggggtttctatccgcagtcaagatagccatggaggttttcattgctggctaaaggcggctggagagtgcaattcacgaaaaatgaacacactcgtggacactctggaaggctattctgcagaagaaagccagagattcaagagacgctggtttgttactgggtctttgaatagaccaaatagtgatattataggaagaaataggtacacttgatattctaaaactataattttcagagttcagaaaagttgcgaagagccaacggattcttagtcggatccaattttggtatttcaaagtcagtgtaggatatccctttatatcgtccgttgttttcccaagagatcccatgttgcagaaattaaccagtcagactaacttatatagctgataacaatgacttgatgaggcaagtgacgttgagtatgtagagttagaacatcaaagaaggaatctccatgacacgtgcaattcagtggagtttcttggcgcgaaaaaagtacagatttgaagcagcgcactaataaaaaagataagagaaaaaaaaaagatagacatagcatgtcctggtttcgatccagggtcctattgtgagttagtttgatgtttgtgagtcaaattgggttcggtgaaacgtacctccgggttatgagcccggcgctcttcccctgagctaacatgctgattggtggaagatatatgcctgacgttcgtgagtcaaattgggttcggtgaaacgtacctccgggttatgagcccggcgctcttcccctgagctaacatgctgattggtggaagatatatgccttgggtaaaatatgtatcatgttttcgagaatttcgagttctatatatagtagctactagtacatatgttatacaaaagtacctcatcatctaataatttatggggtactagcttcacttttagaatatattgactagtactctgtagataattcttactactcaattagacttacacaggttattcacctttcgtaaacatttattattatttttatatctcaaagtagggatatatgattttcgcgggtgctggattacatcccatgagcatgttagctcaggggaagagcgccgggctcataacccggaggtacgtttcaccgaacccaatttgactcacgaacgtcannnnnnnnnnnnnnnnnnnnnnnnnnnnnnnnnnnnnnnnnnnnnnnnnnnnnnnnnnnnnnnnnnnnnnnnnnnnnnnnnnnnnnnnnnnnnnnnnnnnnnnnnnnnnnnnnnnnnnnnnnnnnnnnnnnnnnnnnnnnnnnnnnnnnnnnnnnnnnnnnnnnnnnnnnnnnnnnnnnnnnnnnnnnnnnnnnnnnnnnnnnnnnnnnnnnnnnnnnnnnnnnnnnnnnnnnnnnnnnnnnnnnnnnnnnnnnnnnnnnnnnnnnnnnnnnnnnnnnnnnnnnnnnnnnnnnnnnnnnnnnnnnnnnnnnnnnnnnnnnnnnnnnnnnnnnnnnnnnnnnnnnnnnnnnnnnnnnnnnnnnnnnnnnnnnnnnnnnnnnnnnnnnnnnnnnnnnnnnnnnnnnnnnnnnnnnnnnnnnnnnnnnnnnnnnnnnnnnnnnnnnnnnnnnnnnnnnnnnnnnnnnnnnnnnnnnnnnnnnnnnnnnnnnnnnnnnnnnnnnnnnnnnnnnnnnnnnnnnnnnnnnnnnnnnnnnnnnnnnnnnnnnnnnnnnnnnnnnnnnnnnnnnnnnnnnnnnnnnnnnnnnnnnnnnnnnnnnnnnnnnnnnnnnnnnnnnnnnnnnnnnnnnnnnnnnnnnnnnnnnnnnnnnnnnnnnnnnnnnnnnnnnnnnnnnnnnnnnnnnnnnnnnnnnnnnnnnnnnnnnnnnnnnnnnnnnnnnnnnnnnnnnnnnnnnnnnnnnnnnnnnnnnnnnnnnnnnnnnnnnnnnnnnnnnnnnnnnnnnnnnnnnnnnnnnnnnnnnnnnnnnnnnnnnnnnnnnnnnnnnnnnnnnnnnnnnnnnnnnnnnnnnnnnnnnnnnnnnnnnnnnnnnnnnnnnnnnnnnnnnnnnnnnnnnnnnnnnnnnnnnnnnnnnnnnnnnnnnnnnnnnnnnnnnnnnnnnnnnnnnnnnnnnnnnnnnnnnnnnnnnnnnnnnnnnnnnnnnnnnnnnnnnnnnnnnnnnnnnnnnnnnnnnnnnnnnnnnnnnnnnnnnnnnnnnnnnnnnnnnnnnnnnnnnnnnnnnnnnnnnnnnnnnnnnnnnnnnnnnnnnnnnnnnnnnnnnnnnnnnnnnnnnnnnnnnnnnnnnnnnnnnnnnnnnnnnnnnnnnnnnnnnnnnnnnnnnnnnnnnnnnnnnnnnnnnnnnnnnnnnnnnnnnnnnnnnnnnnnnnnnnnnnnnnnnnnnnnnnnnnnnnnnnnnnnnnnnnnnnnnnnnnnnnnnnnnnnnnnnnnnnnnnnnnnnnnnnnnnnnnnnnnnnnnnnnnnnnnnnnnnnnnnnnnnnnnnnnnnnnnnnnnnnnnnnnnnnnnnnnnnnnnnnnnnnnnnnnnnnnnnnnnnnnnnnnnnnnnnnnnnnnnnnnnnnnnnnnnnnnnnnnnnnnnnnnnnnnnnnnnnnnnnnnnnnnnnnnnnnnnnnnnnnnnnnnnnnnnnnnnnnnnnnnnnnnnnnnnnnnnnnnnnnnnnnnnnnnnnnnnnnnnnnnnnnnnnnnnnnnnnnnnnnnnnnnnnnnnnnnnnnnnnnnnnnnnnnnnnnnnnnnnnnnnnnnnnnnnnnnnnnnnnnnnnnnnnnnnnnnnnnnnnnnnnnnnnnnnnnnnnnnnnnnnnnnnnnnnnnnnnnnnnnnnnnnnnnnnnnnnnnnnnnnnnnnnnnnnnnnnnnnnnnnnnnnnnnnnnnnnnnnnnnnnnnnnnnnnnnnnnntgacgttcgtgagtcaaattgggttcggtgaaacgtacctccgggttatgagcccggcgctcttcccctgagctaacatgctcatgggatgtaatccagcacccgcgaaaatcatatatccctactttgagatataaaaataataataaatgtttacgaaaggtgaataacctgtgtaagtctaattgagtagtaagaattatctacagagtactagtcaatatattctaaaagtgaagctagtaccccataaattattagatgatgaggtacttttgtataacatatgtactagtagctactatatatagaactcgaaattctcgaaaacatgatacatattttacccaaggcatatatcttccaccaatcagcatgttagctcaggggaagagcgccgggctcataacccggaggtacgtttcaccgaacccaatttgactcacaaacatcaaactaactcacaataggaccctggatcgaaaccaggacatgctatgtctatcttttttttttttgcgttcttcgctttcacggtaaatttgcggtatcatataggattctacattgactgtagctcaagccattgcttgcatgtcttcttttggactttgtatagctttcttcaggtctctcctaaataattaaacctttatatggaggatgtgctggatatatatcacctcttaccttgttggtatctagatgtacttttgtaattgtttcatgaatcgcattaaaaccccaactattcaaacttcatatcagcagaggtattgcgatatcctctaaattactgatagaaaacagtcccaatattttcccaagtttggtaatagccctacatattggtccccatgccaacttactctgtttaattgggtactctcgttttgatcgagtacaagcaggcctatctcgatcacacaattcattattctcaaacacaagagtttcatgctgtggtgcaacttcccgctgcctcaggccatcaccgacatcaccagctctacacgacacttagacacagtggaagtgcttgatttacgtgctcctacaatcaacgcatacagtgttacactctgggcttcatatcctcgactcaaagttataatttaaagacttcaacccatcgccgatcatcctgggggagcggaactccaaagtgggggccaaagagcgggagtctcctatctggcatttatatccatcaaagaaacataaatcaactccaatcctgttgatttccccagcataaataagactctctgccttcataaccccgaacatccccaaacaagcaaattagccagtgtcggggaaaaaagaaaagaaggaaaaaaaagagggtcactcagccaacctgaaacgaaccacaagcccacaccaacccaacccaacaaaccaccctatacagacaaaatgggccaaaaggcctccgtcccacaaccgggcgcacaaattcaagtcatcggcgccgggctaccacgcaccgggacctcatcattcagcgaagcgctagaaatcctcctaaacggaccggtgtaccactgcggcacgcaaatatcgaaaggcccacctggagagataaaaagctggatgccaattctgcaaaactggctcaaaaaagacgacagcgcaaggcgggaaaatatgctcaccctcctgcgccaccaattggccggctacgtcgccatcaccgactccccaggctccgagctcgtcccggaactcatggagctgtacccggatgccaaggtcgtctgcaccacccgcgaccccgtctcatgggagaagagtatgctccacgtgcagagtttgactggcgtttggtttgcgcgtgctgtcctgctcccgctggacgggttgagacatttcatcccgtatgggtatttgctggcggcgctgtgggagaggctttatggtggtgttgctggtcagcatggtcgggagacctatgcgagccatattgcttggctgaaggaggttgtgcctgcggataggttggttttctttgatgttaaggatggatgggggccgttgtgcgaggctctgagtttggaggttccagttggggtgccgtttccccgtatcaatgattccgaggctattgagaggtctattaatcatcatttacggaggggtcttgcgcactgggcttgcatatttgctgtgtttggtgttggggtggcggctttccgcatgtggaggtgagacgagggcgagacaattgcatacatgtgattgaaggataagaggtgatcatttggttgcggagttggtattttgaattgtgcgattttggaaactctttggttggtcaaactccaacattcagcgacttgcatacattggattatgttggtttcttcaggcccaggtggagcatcaggcaaaaactcactacgatagatcggcttatacagtcatttacatagccatttacacagaataagatatatatgtcctttggaacatgcattacaatatatgaaacgaaataaattgcctaaatgtcacaaataaaattttgtacgccaacttttgaactcgtaagcataaatccgacattattaaccagttcgctcgagcgatgccgagctttcccttccactatcatttatttcaaaggtagtttcgatcttcgtgtgagtaaagatcctgtttttagggataatacgctccttgctggagttggccccgccaatgttgttacccatgggatcatcatccttgctgtcgaccgtgaacatagtgaggctgttgggatccctggccttggagaatctagatgcataccacggagaagtgttgttgcttgaccatgggttatacttattcccactgctgtattcgccgatgaagcgaggcacgaagtgggatgcaatcgccttgaatgacgggattgaggcagcgaatatgccgacgttggtttcgataacagaccaatacatggaaccgctgatgacgtaggtggagtccttcgagctaagcatggcaggaatgtaggtaattcgaatgatcgaggagatgcaagcgctgtagattaatccgttagcaagcatccaggcggaggtacttgggtagacttacaaaagaccaagacagaggataaaggccaggacaaacttctgtttctgaggcatctggagatggaagattaccttgacgggcaaggtataagtcatgagatcggtgacgatgttcaaggcggcgttgcatagatagaaaatgttgatgttgacgcattttccagttccagttccagtccaggccatgctaatgggtcgacattggaatgcagccacgagaacgaatgagatggcttgtgctgcgattactcccatcataacccaggataggcgagtgagatagcgatctccgaggcgagtatagaaccacaggacggaggttttgacgaatccaagtgttgcgagatagaacattgagctcagccagacagcctggggaaggttagaaatgcaatgctgtacaatttcgggatacgcatccttacaaaagaatagtcgacgatcttggtctggtcgacatccgcaaaatgttttccaagtccatgtttgaccgctaattgatattagttgctgcaaaaagtcgtaggaaaagctagaacataccgatgattacgacagctataaatgcccatgacaacgcctatttccattagtatgatattgtaatgacaatgtcaatgtctcttacacaagcgcaaataatgaggtctggaagatgtcagtatggtgttggtaaaatagatcaagcataatctacctacagtcgtcaacgcccatttggcccaagacataaaggcgtgcgaagagacgaagagccaacacaacgaaggtcaaggtggcaaaggccacacagacgcccacgaccatagggccttgagaaccattggcaccagccatgacgaggaatatggatgatacaagcagaaataaaaagagagagaaaagaccgtgagttgacgtaaagaaggaattagactagatgaatagtatagatagttgtttcacatatcccatcgagaacgaatgatcaaatgattagtgtaagcataaacgaaaaaaaaaagaaagaatgattagcggtaccccagcttatgggctatactacacatatttatccctaatgcccctggtactagtttgaataaaagtctgcgcacactacggatgtgaatcctgcatggatctagtagccttggagatccactgtataccataaaaaaagccacaaaagaagaaaacatcgtaacacttctgaagccacacgagacagactatccccacaactaaagacattcatcgacctattcgggctaaaatacgcatgccatttatgggtaggctcccagtctcaagccacttacgaaaaacaggaagagccctaaggtgggttttctagcgctgtgatttgtcactcagatatctctagttgtaggtgcaactgaatcatgctttggcaaatgaagcagcaatcgtttataggaacctttgttccgggacaatgagtcattgtgtataggcagtaaagacatacacctgatcgagttggattggctcgaacaagtatcgtgggtcgacacatttgtctcgaagacgattattatcattttctaattattggaaagttcaccaagtagaaaatccttatagccaataaggaagcaggaaaaacatggaagaatagaaaacgagagtccgtgagttcccgccgaggtggagagatctgatttatttttgttctcatgcgatcgagatgttcgatgctgatcaatatcttgatactaatattaaatagtaactagtatgtcctagagtgaatacgttatacggagtgatattgtgcttgtatagtcccgataaccctaattccgacggacaaaagcaactagaacatagcaaacccagcggaacattgcttaaaaatttagacgaatcctgccagatattaataatgtagaggaggagctcaccgatctaaacgattcagaacccggggagctcttgtctatgcgcctaattacggaatatgacggagtaacggacgatggatggcccatagtttgaagcctcacctcgatctggacgactccagttgccttccgagcccgttctgagcggagagtgggtcgtttaataacttcttattaagcgagattggctaggttaactagttaactagaatgtgaagcatcggtgcatctcatatgacatcaaaaacctacactgcacattcttcaaggtacaaagtgtgaggaaatggaactttaatagttactgcgtacatatcctatgttgtacatatcaagagccttttcgcaaatattcttagagatcgactagcaattttttatcctactagaagtgcttccaagccaacaggattaagaagcacgatactccgtatactccgtgcaaccatagaaattatccgctttagcaaatagttgatcactagggcttggtctgtctcatacaataaacctattttatcttttcccctttttgggaaaccagtggagaatcaaaagtcggagtctaactcgttccgagtctcctaccgcgttggtgccctgactagtcaacgatattaattccctcatctctaaatgttgaaactaggtaccttttgtatgcagatgccatacgaaaggtacaaccatagaaaagctacgatatcgatttccccaacactcaactaactcaaaaataatggaacatactccgattggaccgttcatggaaaaacactatacatatagattatatggcacgatcttttactttgtgtagttgtggttcgaatcctttgtgacttttgtatggaattccctacaaaagatacctacttctggaatttattggaattatcgtgacagccgagatattccgatttcctgccacgattgttgtaatccgggttgatgaaaatttcgcacgagagccatcatctgcaactttatttagtcgactccatatgaggacagagaccagtgagaaacactggctatctgtagtggagaacgccagcctcccgctccaccttagtgcgatgtactccgtcattccggtctggcccagtgcaaatgaccctagagaaccttgaaaggctttgactcacacccggtgagaaactgccgagcaactaatcccctgcgctggttgttttaaatgttcgtgggcaacggcgcctctgaacggcgcgcaccgaacccgcacggccccttgacagttggcaacgtctttctccatattcagaatatctttactattctaggctactaggcacatcacgacgggatgtgtgttttccaggaataaccgcaacagtggatcagcccaaagacgcgattccttagcaagcggagtcgcaatccttcgacgatttaccgatgcccttagcgcaaggactagcaccaagggggccagatgcacgagctgtcacacgccgaggatattccaaccgttgagcccaggtttggtctaggcttgattccaggcaaataccagcatcgtcaggtgttgttagctcgacatagccttggccaatgacctttgggcccttactactacaacgaatatgctgtttagtgcgaatattcatccgcggtccttcatttccggaggggttacttcctccctctgtcaaaaagacatgtctgcgtcctccatgcatctgcatccctaatccgccatgggtcttgcagaaaatgtcctgtcactggtgacggtgaccaatgtcattttgagtcttgtggcctatgtcacgctcaagtttgcctggcaagttatttactatcgcttttttagtccgctcgcgaaattccccggtcctttctggggctctgtaactcgtctctggatcgcatggcataatctgcaggagaccgaggtaccaactgtttatgcacttgctaagaaatatggttggtcttgattatatatccgaaagaaatggctttctaacaagtggacatcttaggccctgttgttcggatcaccccaacattgttgctggtcagcgatcatgaaaagctcccggaagtctaccaccgcaatgcagacaagaccggacactacattaccggaagctttggtgagaccgagtctctgttcaacatgaggtctcataagacccatgccgtgttcagaaagcacgttgccggaccggtatgacgatatgcgagttcaattgcagatatcaaaaaatgaccctcaaaatagtacagtttcagcaacatcaaacaaatggagccactggttgatgtgcgcatcaccgaatggaccaccaggctcaacgaaaagttcgcgaagagcggcgaagccttcgacttcgcctggtgggcagtgtaagcagcgcacgcgccaaatgaaacaatgctccgactaacaaaacaaccagctacatggcctacgacatcatcagcgaaattggcttcggcgagcccttcggcttcatcgaaaaaggcgaagacatcggcggcctaatccaaggcttccacgacggcctcccagccttcggtctcctagcccgcctgcaccccttcacctcatgggtaaaaaccaccttcttgaaaaagtacctcgtagccaaaccagaagacaactccggcatcggcgtgctaatgcgtttccgcgaccggctcatcgaccagcgcatcaaggagatcgaaaacggcaagaaaaccgaccgcacagacctgctccagactttcctcgatgctctcacagaagacggaaagcccctcgatctggagtacatccgcgccgaggtcctgctagtcctgctcgctggcgctgacacaaccggcaccgccttccaggccatggtgcagtttctcatgacccacccgcaggcgtacgagcgtatgatggcggaaatcgataactccgcccgcaagggtctcatctccgatatgccacagtacaatgaggtcctggagcacctgcctttctatgttggctgtgtgaaggagactatgcgtctgtgtccgtctgcgccgaatatcttcccccgctatgtccctgagccggggctcgatctttatggtcgctttgcaccggcgggcacggaggttacctgtaacccgtacctggtgcatcgggatccgaggctttatggggatgatgccgaggagtttaagccggagaggtggttggatgctgagaaggcgaagttgtataataagtataacttttcgttcgggtatgggtcgcgtgtttgtttagggagggatattgctatgatggagttgttcaagggtcctttgcaggtgagtctttttccggctgtgctacgtgctatcctggggcgagtgctgatttatcgtctagttcttccgtcaatacaagccggagactgtaaagggtaagcccgaggctaagctcatgaccaaaggtggtattagctactggagagacgtgtggttgaccatctctccccggtcagaggtgaaggccgagggaaggcttgattgaaggttgggtctacatacagacagaccggaagataatgccggtctaaaaaacgctacattccatttgcacaggatacagctcaaaaattttcatttctcaaaaattcaatatcaatttcccggttctgagtcattgccatccatatacctatattgtgtttctctattgtagtgtcgcgcagaaccaaagcatgcgatcgttctcatttgcccacgcggcattcttgaccttggccagttcctcgccgatatatagccccgcctcgacgctccatcgcgtccccgtcgcctgacccacatcgtaccagaagcccttgatcgtctcgacattatgtcggtagttagatcctgccgcgacgtctttcatcgcataggatccgcccagcgtattccctaactgacgcgcgacgatcatcaagctgggtcgacggcgacagagacggaccatatgcgtcgcgacgcggacctgctggtcatagtcccacaggtggaagagcgagctcgcaaagacgacgtcgattttcccggctaacttctggaaaatcgggctcgcgtggtccagacagtcgggcgagctcaggtctcccacggcgaaagtggcgttgagacggtctcgatcgcggaagagctggtatccgagatcgataaacggttgctctatatcacatccgtagagctgctcgcccgggatgccctggtcggcaaggaaacggatctcctgaccgaaacagcagccggcctcgaggattccggcggttggatcgtcgcggagacgggccagtatgcgctggtagactggatggtggggtagctggaaggtgaggaagcgtaactggccgatacatggatagtggaagattgagtaggcttcgtcgcgctacggattggagatattaatgattgttagctatttgagagactcaaaaaaaaaaaaaaaacaagggaaaagcaagttgccgcgtacgagcttcaagacgtgcgggaggatctcgtccggatggaagccgctgtagctttctagcagcctctgggcctcggggttgatgctctggacctcctgctgataccattcgggtttcttctcggaccccatgattcttcttcgaaggagggagtaggtatcacaggggatgatgatagatgaataaatgtactgctatcatggctgccttttgtagtgagaggcacgccttaagagacctggtcgcagatcattgccgagtatcgcaggtggccatgcagtatggactagatctcactgttccttcggagatttagcggttgaaacaagcctgtaggctgatttcgctccccacatagcgatccttgcctgtgctcgctaatacagccgtttctgacctttaaagcagtcattgtcggtgtcaatcccactggtcctcgtattctagttgtcaacgggggtctaagatcaggcaaaaaccaggcattcaggcattaaatgcaggcatgcgaccttacgcgctataactacaccgtcgtaacccccttaatacagaacatggcctcctggtagattacttgcatgcctatgaatctttgcgttaccgcatttacctacgcgtcgaacctgcccaagtctttctctgcactcaacatcatgatgcgagccgtgcgaaacgcctggactattgccgcccatcggggtttcactacgtctctaccctccattccttgttaccgaattccccgacggtctagtccgagagccatagttgtgtcgcatcgaacaattatgtcgccgccgcagtggacatgcaccccgaaagtgttccctacctcgggactcgaattgcttgaccaatccatcgagcttgaggaagagacactgtcggattatcaaccggagaattattatcccgtcaaccagggcgaagtattcaatggtcggtatcaaacaattgccaaaataggatacggagtaacctctacagtttggcttgctgtaggtgtggtgggttcgcttcagcccaaccagatgatatggttctgatagcattccttgaaccagtgcatcaacatatgttgttctaaaggtttacgtaacaggccaaaaccaggcctgcgagcgagagctgcacatctacgagcacatgaacctggtggaaacaaaccaccctggcagaaacttcgttcgcaaacttatcgaccatttctatatacagggtcctcatggccgtcatatctgttttgttcacgagcctctcggaacgagtacagatattctagtgaagatgttctccgggcacaaaatgagccttgatgagatgaagcccggtatccgacagctacttatcgcattagacttcttgcactcggagtgccatatcatcaatactggtaatgatcaatccgcctgacgacttcatatcataggcctaacactgttacagatattcagctgaagaacttactacttcctggaccggagacaagcgttcttacccgattcgaggaagctgaagttgcagacccatcacctagaaaaatgctcaaaaaccgaacaatctacaagagcttaggtttccttccaaaaggtgggctgccgatcctcgctgattttggggaagctcgattgggcgacgaaggacatagtgatgatatcatgccaaacgcttatagagctcctgaagtgatgttgagatcgaactggggttattaggtggatatatgaaatgttgtcatggtcgtgagtggaagattctaacctttttaacgagaaaatgctaaaattttatatttaggcctgggacattgttagccctcgcacccttatcagtggcaaaaatccagatggcgtctttgatgaccgagttcatatggcggaactggttgccttgctaggccctccgccacctgtattccgggaacagagacaccccagttcggtctactgggatgagtcaggcaattgaaaggaagtagtcccaattccagacatcacttttgagaggcttgctgagaaggttgaagggaaagacagagaagggttctggttcttgtggtggcttcggatggccttgcagtgaaaccccgaggaccgggcgacggctttgaaactcttatacgacgagtggctgatggaggggctgtgatgaaagggctgggggaatgaggcagggatgagcaaatagtgggtgaacagaagaaaggtggcagttcgatatgtaccctactcaaccgctgcataagtattccaaagctatggaataatagccttatgctattaatgatattacaggaaccatcatgaattacacaagcgaaaaaatgtcactcaaatggcgctatacctgaagtacatagtttaaacaggtgtgcaaatagggattctcagctaaaacatcaaatagatttgtgggttgaggatgtgccagcctccatgtaagacagaaactggtgttagcctggcatcgagcctcagtctgcatcgcagagctgtacgcaagaaagtcgccatatgtgatagttgtagctgggtccttgagtagacagagctcaccgttccagatattgatgattgtatcgaatcgaggcagatactgcagctcctgaaacatcatgataagcgcggtgtatggggggatgtttcccttgagttctctgttcactttgtagcgatatgccaaggtgttgatgaattcctctgggccgttgaactcagagaggctggtaggacggagacattgctcgacagcagtaaaccattcgtcaaaaccgcctctgtctttaagaggtgcgaggggacagaatatgccgaaagtgcctagctcgggcagatgggttggctgatcctcatcggcagggttctccaaacaagcttcatcccagtcgcgcttgtttcgtgcgcctggattagtttttgtgccaggtgcacctgtggcttgagcttcgctgtcactcattgtgcatcagaagtgttgttttagagaagtttctcgaaaggtggaaaggcggatgagcttacagttcggtaagacaaggggtggaaaccaggggagatgatagatggttgatggaagaagggaataagatacgaaagagaataagaaggttaaaaagggagagatgaccttagaagagaagacaagtgtcgaggaaggtatggacgtgtgcatatgaagacagagagcaagcgcctatgtagtgcacttaggatggtgaatagccaacctaccacgcagttgagatcaaaacaaggactgatcctgtctctaagatgccatgaatgacaacaatatatctacagatgttctttaactgctcacctagttgatcttccttcctctctccatggtgtctttccatcttgccttctctacacaaagcgtaatatggagtatgatacaatcaaatggaatatgtaaatgagagctactgtatgaacacgaaaaacaagatgtaagccaggacaaattttgttgaatgcttttagtaacccgacacccaccgctagtacattggaacatggtatggcgtcaaatatggcagatagagagaaaatcccgagacattcaggatgcgttcatgatcattcagcagtacccatgacggcatcctaaacaaagacagtgaatgttagtaacggagctagagagtatgggtatatcaaggtgtttgcttactcttgcctcatggtacaaaggagtgataccggtccagtgaacaaactggtgcacaccctgtccaacaagagcctccagtccagggatggtactccaacccgcatcagatgccagctgcatcaaggcggtgacagtaggcttgtaggccatctcaagaagaacacggtgcttgccagcgtcgggagacttgccgatgagagtgccatcgacctcctgagcgcgctcgaacatgtggcagagcgtctcgcgcatggcagggtcgatgggacggtcggcggggatcgtgccaatagcgacccggggaacggtgtcaagctgggcctggttgtctacaacgcggatgttgtaggtggtcgggaaggtcgagaccataccctcgagcttgctggcgtcacggcccaccacgtagattggggagaagtgcatgtggtggagggcgaagatggcagcgcgggcagtaccaccgccgccgatgacaacagcactctcgttgccgctggaaccgtaaattcctgtattccgcatgcatcggatcataccttgccaatcggtgttgtaaccaatcagacgagggggcttgtcgccgttggggacgggcacaatggtgttgacggcgccgataatttcagcttcctgagcgacttcgtcgagcaggggcatgatatccaatttaagggggattgtcaccgaggcgccaccgaagtcaggggcgcggatgaactccttgaggtcttcgacgttggcagtctccagacgagagtactcgtggggtagacccattttggcgaagagggtattgtgaagagcgggagaccgcgagccggagacagggaaaccgcagatagcgaacttcttggccttgatctcacccatcagggaaagaccacgacgaatctctgcagcggacagctgaccaggtgccgccttgaaaggaaggctggggtgagacacaggggtcatgaagccgttcaggatacggctgagctggccactgtcgcccatgttgatcgcaattagcggcacgtcgtgggcttcttcagcccatgtcttgaacttccgaagggcagtgttatcatcaagggtattggcaacaccgacgagcttgatgatatcgccgtactcaagagcacggttgtaggattgcatccaggacatgttggcccacgatagagtgcccttgggatcatggtgcgaggcgatgatcttagagtaacccttcatctcagtaacggcacggagcattgcatcggggaacgcgatctcaagatccacgaattcgcacccagaacggaacgctagtcggtacagctccattgccgcatcatgagcatcatcggggaagcggccaccttggctcttggtgcggatggtgaagatgagcggcaaggtggtacgacggcgaaggaaagacatttgttccatgacgtagtcaaccgagggaatatcgccgtcaactgaagggtccttcaacaggtcgacccgcagttcgacagcatcagacccgacacaagcctcagtgataatatcgcccgatggttggagatcaggcagagtcaatgagacaaagaagctgtgcttcttcttcttgatgagactaaggctgtctattaggccagtgactacccgcatgaagcgggtaaagtcctccgaggcaagggctagctccgttgaggtcgagtgctgactatagtactggatgttgctgcacttttcgaaccaaggcttacgtcgtagccacacgcccatcatatcctccacgtaggcagggcgggtcttatcaacttggaggaagtccatcaccagcttgatgttgcgcatgatgaggagcacgttgcccttgctcttgtggtagtcggtaagtagttttcgtgcctccggcagttcaacaacacctccgccgcaagcgaaggcatagccagtaggatgatccttaaggacacgccgaaggacagcgagttctgcatctctgaatccctcccagccgcgtgtcttgataatatcggggatagtcgtaccctcggaagtctcaagctcagtatcaagatcgatgaaccgacgaccaagagccttagaaacccagttgccagtggtggtctttccagcgccacgcatcccaatgatgaagatagaggcgctgctccgctccacttcgctcgagacagcatgctcggattcctccaattcttttccagtcaggttcacgctgaacatttgcttcaaggtgtcccaccagccaggccaggtcttaccaacgcattctttctctagaataagggtggactggggagcgacaagagacaacacactgaaactgaacgcgacacggtggtcatcgtaacagaaaataccaccggatggctggcgaagggtggaacgatcaataccgtcgatctcaagcccgtcgtcatgctcacggcacaccacgccgaatttggccaattcatctttcatagccttgatacggttacattccttgacacgctgatttgcgataccgtagatacgagttgtgtggtttgagcccttgccccgggcaacggccgcgagaacggaggcagtaaggaaggcatctgtcatgggctccatatccacattaggcagcggctgcaaaacgccatcagtaggcccagtaacagtggtggaagtatcggtctgtaaaacggagcagcccataggccttagaacatccactgcgaaacgagcatcgccctgaagggacttggaaccaatgttagggatagtacaagtcgtgccagtgagggcagcaatggccaaaggataggtcgcagagcttgcgtcgctctccacaacatattcagcagggttcacgtagtgagcctgaggaatgtggtaggtgtgctcctcggtagtagacttcttcacgtcgatgccgaaagatctcatcatcgcagtcgtcatgtcgatataaggctgtgagatgggcttaccaccgaccagcttcaacgtcaccggctccttggcgtatggagcgcacataagcagcgaggagacgtactgagaggaaactttagcggccaggttgatctttcctcctgcaaaacctccagaagcggcgatcttgagaggaagacatcccttgctttccatgtactcgacaccggcaccgttgacggtaagagcgtcgacaaggtcgccaataggcctttgcttcatgcggttgttgccggtcaagacactcgagtcgacactgctgggggtagcgagtgtagccacagtggtgaggaatcgtgaggcagttccggcgttacccaagtacaaaggcgtaggacttgcgatgatctttccgcccttgccgttcacaacaagaacttcaccttcctcctcccaagagaaagttgccgcgccgagtcgctctagggcattcagcatgacctcagtgtcgtcggagtgcaagagattcttgatgcggcaggttccagaaccaagcgcagcaagaacaagggcacgatttgagatactcttcgatccggggggtgcgcaagtgacattgagcgacttgggcactccggggtgaacctcaatactgggagcaaggacgacaccaatatcctcattagagacgacactggccttcggctcgtgagtacggccgattgctgacaagagtacaaccttctttttgggaccatcattcttcttgtccaaagccatgttgaacagcaactggtctactgagcagtgcttaccagcagtcaacttacgaacccgtggatctttcatggaagtgggcaagccgtaggccgagaggcactttaccacacgagcaacggcgactcccttcaggatgcccaagtgtctcgcaagctctgcctccttcaccatgccgattgcgacacattcgccgtgaagaatctgaggcgtaaggatcgcctcaatggcatgcccaatagaatgaccccagttgagcaggttgcgaaggccgccttcacgctcatctgcggagacaacaaaggccttgtgacgtgctgatgccaagattctagccttcaggatatcccggatgtcgtcgaagcgaccttggccagcctttggctcgctgcgcacagcagccaaaattgaatctgcgttatcttccaaggcagtgaactcctcttcacttgaaatagcagcagtcttgatgacctcggccatgccattgatgaactctcggacggggagagtctcgaggaactcaagatcaatgtagattcttgatggctgccagatagaaccaataaggtttttaccaagcggagtgtcaatagctgtctttcctccgattgaggagtccaccatggcaaggagggtggtcgggacctgcacgaagcgcacacctcgcatgtaggttgctgcaacgaatccagtcaagtccccaatcacaccaccacccaatgcgatgatcactgtgtctctaccacatggtggattctggcttagcatccaatcttcgatgtcggcttttgtctgccgtgacttggagctttctccgggggccgcattgtggatgaggagccgcgggggtggggtgatggaagcagcggcagcctcaaaagtcttttggaaagtaggggtatagagagatccgaggttggtatcggtgattaggacgtaggtcgtcgaggacaagccactgatcaggtcctttgcgacaaaattgcgccaaagaccaaagtcagcgacaatgctctcccggcccaagatgctgatcttggtgggttcagacattgcggaggaggatatagataaggacttggtaatggcgaagttcaatgactgctcaattcattctgtgacttgttagtaccctgactcacggtactttatctgtttccggccacaatgaatctagggatacaaggtgcacaccgatcatttggaggagagtgaatgattagaggagtttgaccaacctggacaaagcttatccaagagccagtagtgtatcaagagaatataatctccaagtcaagaaccaactagacagaaaaggaagaagagtattgctgcccctccggtgtcgcgggcagtttcttgaccgcccggtgactcaatctatcgatctatgatagttaagcccttggacgtcatcacttacgatttatatcataaaaacatgtacctgcaactttgcttctaattttaatgagttccgattcagactacgaaacaaatgtcctataaaaatttgccaacttctacatttcgatctcaactttcaacttagccgacatcgcctgattcgatcgcgaaccctacaattagagagtacagggatataaatcagccttagaacgatatatagtagctacctacccaggccgtgatatctcgtggcatcacgccgtgaatcaccgaagttcgaattcttctttgcctggctatttacacatgaatacctgccatcactcttcctcatcctcgtcatcgtcctcagcctccgagacttcctctccgagttccttgagccgttcctaagataataattagtcagatccccagaagcttgagaaaatatctggccagtaaacataccttgtcctccattcgcttagcctcaaggtccccaaagacaatcagcaggtcttccagttcagactgggctgactggcgagcctcctccttttctttggcttcaattttagccttgtcgagctgggcctgcatgcttttgagggcttcggccgcactacgagcttgagactcggcctccctagccttttcctcggcctctttagcccgtgcttccagcgcagaggtctgagatacggtgccttcttgggctgtttcaagatcgttgctagacttctgagccttggcaaggtctgactttagaactgcgacagactgctttagggttgcaatctcagcctcatgctcttttttggctgcggcgagatttgactcgagagtcccgactgtattattgtggccggtggattcagcctcatatttctgcttgattgtagagagattggactccaagctttcaactttgctcttgtattcaccgacttccgcttcgtgattttgcttggctgcggccaacgtagattccaggctctgcaattttttggtaagatcggtgacttctccatcgtgggttcccttgatgctttcaaagtctttgatttgcttgttgaggtctgccaccagtccatcattgctttttttggtattttctagctcctgaatcttcttttcaagatcggcgacctgtcccccgtgggccagcttggactggctgatcgtgttctgcaactcctggatctttttgctgaggttatcaacttgaccgttgtgggatttcttggtgctttccagatcttcaatcttcttttgaagatcagtgacctgtataccgtgggcctgattggactggctgatgacagtttccaactcctggagtctcttattgagattgacaacttctcctgtatgttgttccttcatgtgagaaagctccgactctaagccacggatagtttgctgcaaaccaacaacctctcgctcatgatgctctctcacttcctttgctttgctgctcttgttttcagattccaccgaagtttgtttgagctgatggtcgatggcacggagttgatcattgtgctgcttaagtaactcattcttgtggtggttatgttctttttggagcttcgatagctgttgggatagctcctgcgcatggcgttgctgcagagataggttggtttgttgaatctttgacagctcaatcgcgttagattcctttgtctttcggtggtccaactgttcttgatcaagcctccgctgaatgctaacgagatcagactccaatgtttgaagggtctgggtgcgatcttcaatttctgcacgcaatgaatcaacaagctcacgtgaaattcccttttcgacgccattggcaacaacagaaatctcaaacccgggttcacggtcaatggcacgaagcaatcggctgaagttatctttcaggaactcgatgaatgagcggtcaaagaacacctccggcagtccaccctcgagttgactaccagcggtttgaggaagaacctcaaagtcgcgaaccaatggacattcacgaagtcttgtgatcttatcaatatattgttccctgccaagctgttcaatgagtagtttatgtaacgtgatgcgagggatcggcgaatcttttgtggagaactcatagatgacacccaacaggaccgtgcaaaggccgggcaccaatttactgggggtgcgctgatgcttgatttcctgcaacaaggtttgaatgcagctaccctccccaagaagatcattcacgacgtctgggtcttcaaaaagccatccacagagcaacatcagataaccgactgtgattctttcgtcatcgccgcgctgcagaccagtaatcaggtttccaacgacggattgaacactagtgaccacttcttcgccgctctcagcgtcaccctcggtaacagccatagctattgccttcgcctctgcatcatcgaagatcaaatggaacatcagaacacaggccatccacacctgatatggatcggcatttcctcgcgcctccggagcagtgagaagtacagatagaatattaggaatccgatcctgcccgctggtatgcccttcaatggctcgcctgagcacatgcatgcgaattccaggatgatgggcgaaaaatgctttcatacattcgcaggcagcaagccgtgcgtctaaaaggttgttgggagcaggttcgaggctgagctttaaaaatgcttcaatgacattgatgcgtaaaggttcattcgcatcaccattgacagccttgtcgccgcgggggtaggagccccagaggacttcgatatcaccgaatctttcctgcaacggtgagttgccgcgaatcagatcggcacaagttgacaaggcctggacttattagacaaaggtacagacaagggtgggcaatagcaatctcaccttcgaagtcacgctaacactgaatctttgtccaaatgcaatgctaagaacttgctctgtcacgccattctgccaaaatgcagtctggttaatgggtgtactcatgccaccgcgaatcaaaaacaactggatgatggccaataggccccagacattcttatctcggtggaccagagtccactgtggcgccggctcattgtcttttggctcctgctgacattcatgaagcaaatgtgttactcttttcacacaaccggtctcgcggaaaaacgattggttggaaacattgaatctcaacaagtgagccaacaaggagaggcaatcttccactacctcggtcccatgagtcaatgctccctctgcttcaataagcgagaaaagtatttcgaatgcattctcgaatgccacaagcttttgcagctcttccgaggcgggggtcagggcaattaacaagacgagagcctctagcagaaaacattttgtcagctccaatcttccatgtcccacaaggacgcacaaataaaaacgacataccgttccgtactggctccctcgcatcagtcagcacattgactagtttggaaataccaagtggcgctgtaaaaatgcattcttgtgttcgttctggtcgtgcgctgcaaatgtgggacatcaattgaagcgaataaaggcgggagtagaattcacgggcttctaaaaggttgagtagggtagttatattatcttgtcgctttagaaacgttagtccatcatatcagggccgaggtcacgatgcgtacctgagtgaattcatctgccagccacagagctatttcgtccgacgcttcaggctaaatatatatatatataagcaacccgaatgaaactcatcagagtacaagatacccacactagattcatcaggcgtgaacagcattagaagggtctcgaggaccactttgatggtgtccacatcctcactgtcattgcgtagactgctgatcaatgaccgcaggccaccagaagcgactgatgcagggtagagttttgcaaagcttcttaatccctgaattgctgcccggcgatcttccaacaatgtagcactctgcagtctactgcttaatacgtcgattgtgtccgtagccgtttgtttggccggagcttgcgactcgaggattcggaacatggtagttgattcgcaatatcatgatcactgccggccgagggcgtaggaattggtaatcatctatgagagatctatgagagagcaaagtgagaaagtgaggaggttggttagttcgctagtcagtagaaagctgtcctattgtagtgcctaagcgccgcttttggctcaaacccgcagaattgccgaccgcccggaatttatcttttcgtcgaacggcaagctcaagaccacaagttcactgctctcaacctgcaccgcgatcatatctgcggttgcatctcttcttatctttgttacatgattcagaggagtctgtgtcttatctgaactggctcatattgtatctcattcactaacagagagatcgcgcctgcgcctgcacgaacgccgccaactaattgcgacacaacagtaccggaactctcctagtgtcgcattacaatcatgggtgtccccgcgttgttccgatggctgtccaacaaatatccgaagattgtctctccggttattgaggagcaggcccaagtggtcgatggagaagaaatcccgatcgacatcactcgtccgaaccccaatggcgaggagcaggataacctttatctggacatgaatggtattgttcatccatgtacccatcctgaggggaagcctcctccagcggacgagcaggagatgatgatggaaatctacaagtacaccgatcgggtagtcaacatggtgcgccccagaaagcttctcatgatcgctattggtatgtatatattctaatggagctttcaataccctccaaatcggagatgtccactaacctctatcctacgtacagacggtgtcgccccaagagcgaagatgaaccagcagcgtgcgcgtcgattccgctcggcgcaagaggctaaggagaatgaccagaagaaagaggaactccagaagatgctcgcccagcaacatgctacaaagaccggcgagcagttgatgcgggaggaggttgttcagaagacgtgggacagcaacgtgattacaccaggaacgccttttatggatatccttgctgcctcgttacggtattggattgcctacaagcttaacactgatccgggttgggaaaatgtatgtcttgatttattatcttggtaccaatgaacatactgacgttgacagctgaaaatcatcatttcagatgccacggtcccaggtgaaggagaacacaagatcatgaattttgtgcggtcgcagcgagcctcgcctaatcatgatcccaatactcgtcatgtcatctacggtctagtaagtttgtgatgatcttctaaatcaatcttctcagatcactaacttcaaacaggatgctgatctgattatgctcggtcttggtactcacgagccctacttccgagtactgcgtgaagatgtgtttgcccaagactcaaggcctcggggatgcaggctttgtggacagaacggccataaggctgaggagtgtctaggccgcccaaaggagaagagtggagaattcgacgagaagcagaacgctgcccctctgaagccattcatttggcttcatgtcgccgtgctaagagaatatcttgccgtggagcttcgtgttcctcagcaaccgttcccatttgacctggaacgtgcactggatgactgggtcttcatgtgtttcttcgttggaaatgattttcttcctcatctgccttctttggatattcgtgaaaacggaattgatacattgattgcgatctggcgtgacaatatccccgccatgggaagctaccttaccaaagatggaactgttgagttgaaaaacgctcaaattatcttgcaaggactagcaaaacaagaagatgccatcttcgcccgtcgtaggcaagcggatgaaagaaaacaggcgaacgagaagagacgcaaggagcaagacgcggctcgaaatgaagagcgtgctcaaaagcgaaggcggagttccccccagcatgacttgacagctggggatcgctctcacggtggtggcgagcccgcccctcccatggaacttatcacacccggccgaggccacttgaacaaggagactagagagctgacacacagcatggtcatcaaccgcggagctgtgtaccgtgctaacatggagaataagagcgccgctgccgtgttaaagagcaaactcatgaagggcaaccaggatgtagctggagacagcgaaactccagctacaaatggcgaggatgtaccaggtgaaaccccagggcagacttctcccggggttctcgggaaacgaaaggtggatgcaactgaacaggagcttaccgaggcaggaacacccggcagagactctcctctgcccgttcctgttgctcccgagaagcccaaacaagatgagccccaagaagacactgtcaagctgtgggagccaggatacgccgatcgatactatgagcaaaagttcggcgtggacccgaaagatttagaattccgccaccaggtcgctcgtgaatatgcgattggcctttgttgggttttgcaatactatttccaggggtgcccctcttgggtatgttgtcaacccccacttaattatacgattgagcttcgctaacttgattgcagacctggtattatccaaggcactatgcgccatttggtgggttttttctttggtggcttccctcagatttcccagaaatcagctaacacatattttacagctgctgatttcgttgatattggcgatatggacgtcaagtttgagaagggcacgatattcaaaccttttgaacaactcatgggtgttttgcctgcctcatctaaccacgcgctgccgaaagttttccatcctctcatggaaaatcctgatagcgagattatcgatttctacccggaggacttcccattggacttgaacggcaagaaatttgcctggcagggcgtgattcttctccctttcattgacgaaactcgccttctaaatgccatggcgaaggtatatccgctcctcactgaggatgaaaagagccgcaactctcatggtcaggatgttcttctgctatccgaccgaaaccctttgtaccaagaccttgtcgcgaacttctactctaagaagcctggcccggcacaatactccattaaagaggatgtgagtggcggcctggccggtattgtcgagcgcagcgacacctacatcccccacagctcgttagtttcgccattggaggcacatggaatgccaggagtcgatgatgatcgttctctcacgtgagtttaaccctcccatctctgcagtttgcttctttgactaactgatcaaagggttctgtatacgatcccggagtcttctcatatccacaagtccatgcttctccgcggggtaaagctaccgacgccaatgctggattcaaatgatatcagagccacccaaacacgatcccaaaactcgggccgatcattcggtggcgcacctttccagggcagaggacgcggcggccggatgaactactcaagtgaccgcccgaacccattcgctgcacatcttgacccgaagttcaactctgggccttcccaaggtggtcccggtggtgctcccatggtacctcctggatgggttccccctggccaagggtacggaggctacgccagaggaccgcctccccctccacgcggcggaatgccacaccagtaccctcctcagcaccctcctcaacacggttatcaacagcctggggactattatgcccagcaaaacaaccagtacaaccagggcggtcagtacaataacagtcatcaatcaggctatggccagcaggattatcgtggaggcagaggcggtaaccgtggagggcgcggccgtggtgggcagaaccgagatcactactccaacaaccaaggcggaggagggtataatcggtactaaaagtaaatgagggtccggctttctgactgtttcttgcttcttccgatactcctagttattgatcttttgatacgtttgggaattgggcatgtctagggaaccattggagttagagaaatgtaaaatgaattcaattgatgttccaacagacccttcttttgtccttctgcatgcaagagtcgcgccctgatgccccaagagtatatacaaaggctgctcgaatccccatgctacactatacctagacagtaaaaaaaagccattttctcaccacatggtccaaagtctactacttgttctatgttcatctaattggctgttttgtaattattctcactctttatttgggagtcctcctatcttctgcccgcaaccctaatacgatgcttgtctagttgtagaaggcggtgtaaatggaggggccaaggcacactggcagaaaaactaggcggggtgactcacccgtagacttgcaagcccttagagatccttagtcgcagtcaatcttctcttttaaaccactggattcaccacatcatggattttcctgcggaagaagaaatcgtgctcgctcgttggagggagatcgatgccttcaaacgccaagttgagctttcggctggaaagccacgctatggattcctagacggccctccgttcgctacgggaacccctcattatgggcatttgcttgcttcggtaagacgacagcgaacaatttgcgaatgatttgtgttttaatactttccactagacaatcaaggatgtgatcccccgttattggtctatgaagggatatcacgtggagcgtcgttttggctgggatacgcatggtgttcccattgagtaagttcaattcaattctagacaagacttgctcaagactgtgtagcccaggctggctgacacaaaacctagatatgagatcgacaaaaagttgggcatgtctggtctgcaagcggtccaagaaatcggaatcgagaaatataacgaggagtgtcgatcgattgttatgagatacgcgacagaatggcgccagaccatcgagcgattgggtcgctggattgacttcgataatgactacaaggtacgctcgagtacgtctgacattccctgcccttatgttaacactttttttcttgtcatttagaccatgaacccgtcattcatggaatccgtctggtgggttttcaaggagctcttcgacaagggcctcgtctaccgtggataccgtgttatgccttactccaccgccctcaacacgccgctcagcaacttcgaagcgcagcagaattataaggatgtgcaggatcctgccgttgttgtgacattccctctgctggatgacccagagacatgcctacttgcatggaccactaccccatggacgcttccatcgcataccggtctgtgtgccaacgccaatttcgagtatgtaaagatctacgatgaggctacgaagaagaactacatccttctggagactcttcttgggactatctacaaggacccgaagaaggccaagttcaagatcatcgaccgcatcaagggttcagacatgctcggatggaagtatcaacccctctttgattacttctatgaagaattcaaggaccatggcttccgagtgctgaatgacgactatgtcactgctgaggatggtgtgggtattgttcaccaggcccctgcctttggtgaggaggattaccaagttgccatgaaccacggcgtaatttccgagtctcgtcatcctcccaaccccgttgatccgcagggctgtttcacagctgaagtccgggactttgtgggccagcacgtcaaggctgctgacaagggcatcatcaagttactcaaggccaatggtcgtattcttgttgacagccagattactcacagttatcctttctgctggcggtccgatacccctctaatctaccgcgctgtgccatcctggtttgtgaaggttaagcctatcattcccgacatccttgatggcattgaaaaatcccactgggtcccctccaatgtcaaggagaagagatttgccagctggattcggaacgctcatgattggaacatttctcggaaccgtttctggggaacgccgttgccattgtgggttagtgaagatttctcagaagttgttgctattggtagtatcgagcaacttaaggaattgagtggctataagggcgagctcaccgatattcatcgagataaggtcgatcacatcacgattccttcatcgaaaggaaatggcgttttgagacgtgttccagaggtctttgattgctggtttgaatcaggaagtatgcccttcgcaagtgtccactacccctttgagggtgcagatgagttcgaggaccgtttcccagcagacttcattgccgaaggcctcgagtaagttgcccatgttttcccttctctgtccgttttcacgtgctaatattatatttttagtcaaacacgagggtggttctatgtactcagcgtgatcggagttcacttgcgtcaaagactaccatacaagaatgtagtggtgaatggcattgtactcgcagagaacggtctcaaaatgtccaaaaggtgcgtaaacacaatcttgacatgaccacgacccgaactctatctaatatgccgatctcacaggttgaaaaattaccccgacccgtcgctgatcatgaatttatacgggtgagttccgcagttcttcagtcccgagttgttcagcttttcatgttcttcgggattgtcctcataagaagtttcattaacattttttaaacagatcggacgctcttcgattgtacatgatcaacagccctgtcgttcgtgctgagcctcttagattcaaagaatctggcgtcaaggaaatcgtcagcaaagtgcttcttccattgtggaacagctacaagttcttcgagggtcaggtgaccctcctgaagaagacttcggacattgactttgtctttgatcctgcagcagagagcactaacacaaacgtcatggaccgttgggtccttgcaagctgtcaatcactacttctgttcattaatcaggagatggccgcttaccgtctgtataccgttgtaccacgactcctagagttgattgataacacgactaactggtacattcgcttcaaccgcaagagacttaagggtgaaaatggcgttgatgacacattgcacgccctgaacactctctttgaggttctttacactcttgtcaggggcctcgctcccttcactcccttcatcaccgacaacatctaccagcgccttcttccccacatccctgagtcgctccgtgccgaagacagccgctgtgtacacttccttcctttccccgaagtgcgtcaagagctctttgatgaggttgttgaacgcagagtttctcggatgcagactattattgaacttggtcgtgtctcgcgtgagcgtcgggctatcggtctcaagacccctttgaagtcacttgtcgtgattcataatgacccgcaatatctcgaagatgtcaagtccctcgagccttacattctcgaagagctcaacgttttggagcttgttctctcctctgacgaagccaaatacggtgtcgaatattcggtgtccgctgactggcctgtgcttgggaagaagctgaagaaggccgttcaaacagtcaagaaagctttaccttctcttactagtgatgacgtgaagggatacctcgagaataagaagatcttggttgatggcattgaactcgttgagggtgacctcgttgtgaagcgaggaatcaaggagactgacaattccaagggtatggaaaccaatacggatgctaacgtgttgaccattctcgatgtgaacttgtacccagagctggctcatcagggtctgggtcgtgagatcatcaaccgggttcaacgccttcgcaagaaggctggtcttgttcccaccgacgatgtgaaaatggaatacaccataatctcagacccggacaatatcggccttgatgaggctttcgaatctcaggctcacgtgttcgagaaggtcctgcgccgtcccgttgaccgcagtacatttggtggcgacgagcttcctactggagaggaagagggcactatctcacaggaagaacaagaggtgcagaatgctactttcttgttgcgccttcttaagctttagcatgccaaccaaaagaaaatgtgtagagataatatctactttttaactattttttgttgctttgaatgaaatcatatgcaccttcaataccaatcaatacctggcgaaatccaacctataataatttacaaatgcttttgcttgcgccgccgtaccaaaacagcctcaaatatttgagtgattccgatgcttccaacatataatccaagggaacctttctttagccctttctagatgccgcctgttgaatggttagcttgtcgaacagcgaagcactcgctcgtcacctaccaggtagcaatccttcagtcgcagaaactccttggcgcacatatctttatgtaccgagttgtaatcagtaacaacacacttgccgtacgccgcaatctatcaagctagttagatcggcaatgagatgaggtgagacagaaactacacacctctacagagcattgggctgaagccttggcaatcttctcgactgggcgagttcttcccggcatcttgcaatacgaggtgatgatgcagcaaatgcaaagtagcttaacattccaatgtgaaagcagtaagtaggacctccagagcttgggaatccaagattgttacataagaccacgtgaccgtcctgcatgtttctgtcgcgacaaccaaaacaacccgctcaaccgaccgttatctcgattgatggcgcatgggttgagtctattgttcccattcttttggaattgctgattgcagagtgtctctgttcgcgcatgtctttgattctccgcgctccccgctttcgcgatgatttatttggtcctgcagctctatgacccaaatgcgacaaccgcgccttaagatcgcgatttttcgatgcctccgatatcctctcagcgtcaagccgtgacagaagagatctcatctctttccgacgacggtagggcgcaatcaatcactcgttaatttaaacggagcctgacctctatagatgtcggctttctctaccaggttatcgctgctgccgagacaaaacccgaagcggatcgactcccattccgggcgcttttcgaagcatatgacgaagtcgttggcgaacatggcgtcaacgcagatccaggccatgcatgcctgcgcttcctgttcaagatgggaagcaaagatgtacgcggcgagactctcttcgacaaattcgagaatgcgctccaacagatgggaatcgtgattgaaatcggcgaggacggctctaccaacctgaatgagacacatgactacgatcaatatacagtggatgttacccacagccagaccgttgaccgtgaccattctccaattaccaatggagtgccaccgacacccaaacggcgcgcatcgtttaacaccacctacgacattggcgaggatcccacacagagaagtctcatcaatcgccctagctctcgatcgtcaatgtcgcggcttgaaattggcaagccccagttttctaaaccaaaactgtcacctacctccaggcataattctgaacctagcaagtcgccagatcggacacaattaatcagccagtttttggatgttggtcggcggttgcttagcagatttgacggaacagaaaacaagcacggagtcacggaagaaaccttcttgactaatggagtgattgcgaggtcggccgttgctcgtgatcgttcaaagagaatgaccgaggccccacgtccccgtcgttcaccctcgtacgattcttcgggcagttccgaatccaaagaggtgcaatcgatcatgtcgcagagcccagaacacgattcttttgacaaagaagaggtgccaccggagttcatttaccgcccgcaactttccgatctacttcgagatgcatcgaccttcaacatgtaccgacagcgatcgatctgccgtcgaattttgacacaatggctgaaaaaagcttttcaagctcgacagactcgccaaaccagggaaacactcgctgtcaattacgatcgaggccttcttctccgacaagcctttgatccatggcgagcagtaatccaagacaaacgccactcggctcggacagatcggttcttcaagcaccttgaagcgcgtgccagtcgcgcacgggacttatatctaatgaccaaggcgttcagccactgggctcaacttacgtcagaagaagtagctcggacttctgctgcccggagacatgtacttggcgtcaaatatttcaatgcctggcgcgaaatcactgccgtcaacgagttgaaggctcagcgttttgcgctacggaggccttttaatgcgtggcggaaaaagatccaagatttgaaagcagcaaaaactcaagctatcattgtacgcaacacaaagattcaaaaagcatcgttctgggactggtggtggtgcttctgcgaccggcgtgttcttgaggtttctgattatcgacttaagagacgatcacttctttcctggcttcggaatttgcgaactaatcgagagctcgatcatgaaatagatctacataacagacagtcatctttgaagtcggtattccagatttggtctcatcgctcgaaaagcattgcacttgcagatcaggaagtccaagcttctcggcgccaacatgacctcagagaaacctttgatgaatggaggattcagtctcggctggccccggctgcttctcgggtctctgggatggtgaacactcggattctacgaaatgccctttcacaatggattggcaaagccgaaatgttcagacaggcagaggaggtagatcgccgccgaatacaacacaactcgtgggtttcctggaatgacacgcttcgctgcttggcgcttcgtgctcgaattgacgagcgcgtcaaaagtgaggcgatgtacaaatgggtcttgatggaaagattcgagctgatgcgaaggatacgcgaacaacgcatcaagcgggaagtattctcccgatttgtgacaaacactcgggatacttacactcgtttactgtctcatgctgaagcttatgagactcatcagaccgaaaatttggttcgatctaaatttgccatttggcgtgatcaaatgcaacttcagcgtgagcgggagtatgtagcatctgagttttatgctccacggcttgcagctgagtctcttgcaatctggcgatccaaacataatcaagtggtgaagatggaaggttgggctcaagatgctcgattctatttcttgatgaagaagtccatgaagcaatggcatcaggctaaagtggactccggcaaaaaacggcggcaagaatcctatgctaaagtccggcggcgtattaaggtcaacctcgcgtctagagcgttggctgtctggtcatcaaaaactcgagtcatcatggagatggagcaaaaagctggtgatattgatcgcgaaaaattgcttgctgatgcgtccgcgatattcgtccaatggcacgacaaaacaaccatgaggcttcaggattgccagaatgccgaccgttcctatttccaccaactcgcgtttgagcagatgatgcgaatgtccgaagcattcatcattcggcgtgagatggaagaccaagcagagaatgtacaccgattgcatgtcctacgactggcagcagcttctcttcgcaagctcagccttcgtatcttccagattggcagttcggccgagacagccgaagccatgcgcgaaagaaatctgaggaagcactcgagaaacatgttccgcgattggctagacaaggctcaaatgaagctggaagctcgagattctgccggtccatccttcacgcccgcacgaatgtcaacctttggaaatggcgatggcgccggatcagcaattttcgacccctggtatcaagaccaagcagaaacacctttcaaaataagtgacttcacggcaacatctcagacaaccttccatgacccgatctctgcaagccccttggcaaccccaaattacacctctccctctaaacgagccgcccgggcgctagccctcgcccaaatgtccactacccccgccacacccttacgcacacctttcgcaagtcgactacttcgagctgggactacgactgcactatccacttcttccaaacggccgcggactggtcggcaaagctcggtgggaaatagcgtccggtttgtggatgaagaacctcccgagtctccaacagatggtcgcagatcagcgactcgacgatcttaacgatcttgttcggtatatgacctttctgcggtcacttcagcctcatgtacatcagcgattgttataattttttttttctctcataccctgtcgatacgtgcgatcatgtttcattcaatgcatcatccggcgcagcatatagcgggttcaagggtttctgggtctttggtatacagttttgcacttttgccatgattgaatgtgatactcaatttatgaaatgggttttccaaagaactttcgttcaatgagatataaagtatagcatctagtcggtcccgaggtcagataatagtaaatgcttatcggagagctctgtatgatgtgctcaaagctcttgaatacaatttctcgccgtaacaaatagcaattgctgaatccataatatcagtgatatttatagccatacatagctgtgttgttccagtcgacggtcatcggtcacaccgagtggagcgggagcgtaatcgactcaggtggtatgtctcttcgcctcgtcttgccccctgcgtgtatccagacaactccgccaaacacccataatctaccctccatttcacttgcgactctactcccaggcataataatctttgacctggcaatgttgtaacgtgttttcgagcgcaacgagcgtcaagtcccgaaccaaccatctctatgcgagcggtacttccggggagacccccagcgaagctgcaggcgttcagcacggcgctgtgggatggtcttcgtgttgttgtaagtactctcagatattgccagattcccgctccagctctgcggttcgtttaaagctccctgttgctgactcttacccccgcgcgttccccaataggcatacatctccggccacgcgctggttatcctcggcggtccgcaaacgctcctccaaacgatttacgtcgacgatacagaaatcctcgaggccgtagcttttgacgaaacatctggcaagattgctgtttgtggcggccctgatgtgttcgtgtaccagccatacggcatccagggcgaaacgctcaaggtgcgcccactactcggagcttggtcgaccagcaacacagctttataatgacaatcacaactgattttaacatatgcctttatttagtggtcgctcctttatacattccgcgcccccgatgacgacgaaccgatctatacactatcgtggggttcctcgaacgagctcctagtgggcaactcccgcctcgccctttggtttatgaatgacgaaccgcgccttgtatggaaaagggagcttgcaacacccgtgaaattcgcgcaattttctccggattcgtccttgattgttacagtagggcattatgaccgtttggtcaaggtatggagacgactcgccttcggcgcagacgaggttcggttcgaaaactcatacctgccccatccgaatgtcgtcaccgggatacactggcgattacctcggtaccctgagcaatctatggataatgttctgtatacattatgcgccgataacaagattcgggtatgggcagtgacggacgttcatgcgctttctgccctacagttctgggcagagattgacatggatgattcggtccaaccgaggcatgcgtcggatgaggatcaaggaccacaacggcggtatgggtttattttagatggccgcgacttctgcgctgcgacggagcgtgctgttcagaggaccacaggaaacaaggaaaatcatgcgctagaacatatcatcgaggttgcgagcaaggccccggagatctgtattgtcactgatggccggggccatatgtctgcttgggcttttgaagatatcggttctaaagcaaagaccaagttgagcgtcttcaatattctccatgtcgaaggcttggacttgggatttgtattcgatcaatcgccgcaagacgactacgctcagatttgtgcattccagagtacgccatcggacgacaagctcagtgttctggtccatcacttcgacggtcggatcgagtggtatgattctcgtgtggatgttctgtttgatcctgcaccccgcacgaaaagaatcacccagatggcctcttggtctggccatactgcccctgtgaaaaagattgttcggaatgcgattggagatacgctagtgtcacgtaccaatgaaaacaaagccactgtatggacacagcggcgtcgggaaggaagatcgatcttagcgtacaagagtgtcctcctctcggatgagcatattcatcggacatgtgtgctagagaacatgaatcttctcgtcaatctccaccacaatggggtctccctgtgggatttcagctcaaatcatgccaagaaattgacttctttgccattctcactgcccggcaagccactatgtgtgctgcaaatccccagcatccaagcgactccagatgtttcctatgtagcaacaatatgggcagacatgcacggaattgcgtgggaaatacgaggcccgagtcagggatcccacaaggggagctttataaatgagcttggctatcaagtgcgagaattctgcacctttgacatggggctggaggaggatgttgcatatatccttcccgtcgacccagcaggccccaaaacaaaaatatcgggcttcttcgattctttttctaccgacatcgctctctcctacacctacagtggagttgtgcgcacatggacagccacgatcgatccagtgaatgtgaaggtcgattggctacttcaatcaaccgttgatacaggcatcaccaacccatctatggctagtgggagctctattcgcaaggcagctctggttgacgaggaccggactcacctcacaatctgggacaccaacaatgctcagctggaatttgagcaacattttgctcctcatgacattatccaggatttggactggacgtcaacaccagacaaacagtccatcttagccgtgggattcccacataaagttgttctcttatctcagctacgctatgattatctagattcccgaccctcgtggacacaagttcgggagatctggatccgagatctcacacctcaccctataggagactcttgctggctgaataacggccatttagtcattggggctggcaatcaactgttcgtttatgacaaggatattgacgttggagaccgcctagtgtctgagcttcggatgccatctcgcggactatcatctgtcgatctcttcgacgttgtcagccggctgaatggcccgttgcctgtgtttcatccacagtacttggcacagtgcattttggctggaaagactagcttggtacattcgattctcttaaacctacatcgcaagctgaagttctatacggagggcgatgagctagatggtttcctagatatgccggtagaatgtttctacgagcaagatgtaagtgcgcgctttctcatatctctccctaatactaaggaaaatcagggttcccaacaaggggtctccaaggaaatgcgctcttcctacgtcgattccactgatgaggaattgccgtctgtcttagatgaaaacgctgcggccgcgctcaatgagagcttagcacgaatcgccttgccgcaactgtctagccacgaacagttccgcttggcagataccattgaatgcgttgccatggttgagaagcaccggcgctcaatggacgataatgcagctcggtatctcttattcttccgacaacatatgctgcggcggacccaaggagttgccaataaagacgctgtctcatggcgagagattgtctgggcttaccatagcagcagccaagatattctcacagatcttgtctcccggcaattcaatggaaaattgacttggaaggctgcccgtgaaagcggtctcttcatgtggttatcggattccatagctgtggtgcgtgtctgtcacgtcatttcattggtcacgaactaaccaattggttagaaagcgcaactcgaaatcctcgcccgatgtgaatacaccaagacggaagagaaaaaccccatcgattgtactttatattacctagccctcggaaagaagaacgtccttcagggtctctggcgtattgcacattggaaccgcgaacaagcagcgactcaacgtttgttggcaaatgactttagggaaccgcgatggaggacatctgcgcttaagaatgcttatgcattgcttggaaagcgacgatttggtaagtcgagcatcatactctacaactgatcacttccggctaacacccaacagaatatgcagcatcgttcttccttctcgccgatcatctgcgtgacgctgcaaacgttatcataaaccagatgggtgatctccagcttgcgatcgcaatcactcgagcctccgaaggagacaatggaccggttcttcgggagatattagaagaaaaggtattgcctcaggccgcttccgagggcaaccgctggcaggcctcctgggctttctggatgcttggacgacgggatatggcagtgcgggcactgattgtgagtacttttcttctctagtcgccaaaccccaattaatcaaatctagtcgccggtcgagaccctcctattatcgacgaccccagccaccccgggaagcccggggcgagtaacccttcagtccaagtcatatctgtccaacgatcctgccttggtagtcttatatcaacaactccgcgaaaagacactccaaaccctcaaaggcgcctccaaagtgcgacccagggaagaatgggaattcgttattcgcaatgccagactctacgaccgtatgggctgtgacttcctagctctcgatctggtacgccactgggagttcctaggcggactgcctagtcaggatgtactgaagcctaatacctccttggaaatgaacgagaacggagtcgattaccggaaaatgcttcatcggcggagcagcctcgtagttgctgatatgccggtgcgccgagcagatgtctcacaggaacccacacccggcgagaaaccgaagaaagaagaacagaaagcgaagccgaagccacctcctacgatgtttcatgagccggatgccaattcgttgctagacagctttgggttctaggttagggacttaattatgttgacactgtaatattttctggatatacgtacgtccagttgctatcgagtgagaaactggggcttgagcacatatataccggataatgtctggcaatttttgatttccctttccgttttagtgctcaccccttgccgctttttgctcactgagtaaaactactccggcccgctcactgagcatcacctgagcagacccatcccttcactgagcactcacgagtcaccgggcactcaatgagcagcctgatccgctcccatatagcttagtccacgctcgtctcacgggtaacaagatatctgtggcggacgatggtactccgtgtcccattcaccacgcaagtaactataagtctaaaccatcacactcacaaacggaacgtttatccaccctacatcattcagagtacacccttcaatgggttttccttcatcgtcaattctgaacccgtcttcatacggactgtactcctcccaatccagccgaataatgtgcacaacagccatactctcccttctatcggctaggaattactctagcatctcttgggttatctgaatgcagtacctacatcgttgcgactcttggattctgattcggtttggatcaagctcagacccttgttcctcctgttcggcagttgacgcccaccgcttaaagtgatcccgaatcaccgctgtgcttgcgctatcaaatttctatgggtcgtcaaacacggtcaaggccagattatcaagtaaatcagggcccgccatatcttccagtgactccgtagtatcgacgagcagacggcgcataaattctttccagtctgcgtcgctctggtatgtagagcggtagatagcaaaaccccatgcgcgatgaccatctttacgaagccaacgctctattttgtcagcaatgttgctatgtgagctgatgtatgggtggcgtggagattgttcctgcacttgggggaattgagcttgtgggcgcgtgtgtttttgcataggattcgccggtgaaattgacatcgatgagcagtatctttgtagggggaggttcagatgccaacttctttgcccaggatagagcgtgcgcgatgtaactggtgagataaaagcaatactcgtttttttcgatatatgaaggctgaaggtgtccaagcagttaaacaatagcatagtcacaatggttcacgtgattcgcgcccatgtaggcaatacaacttacttcacttccttcattctaacaattgttgaccaaggatcaaacctagcgagagagtcaccgtgctttcatctcaaattaactgtcttgggttattcttaatactacgtcttatcacagaagagtaccaatcggcctgacacgtcatgtttacatattgagattcgacctctccaagaccccggacatccgtacgtatattgtactgagtacaacatctgtgtgatgatctaccctcacacaatggtcaatacctagtcattgcaaggagactgctacacagtagcggtcaagatggagaatccagtttgaagatgcagagtggaaaatttcgcagatcccagctgacaattgtgttgatccccattgctctcactggctgcactacagcccgtagcgcgcttcacctactccagcagccccagatggctgcagatgggttccagttatcctgatggatttgcctatcccagtgcgatcggcggcgccaatctgcgctattacatcgccaatcgcgccgatccttcagctcccacaccttttgcgaacgatggagacttaggccgagcgtgagaaccctcttgcgccaatggcctagctgccgatcgggagacaatgcatacgttcatgcagactaaaatcgagagatgatgctcttaagacttcccccggcccgctggggtttgaagcttttcagctctctctgacttcagaccctttttttgtattctagcgatatatccctggtcgatttttgttctttttttcagcgacaatgcctaccaatatcccaggaccgcccggagttcccctcttgggtaatgttttcgacgtcaaccccaacgagacgtggaactcgctcaacaagttggctaagcaattcggtatgccagcaacccagccctaacgagtgatcactaattttttaggctccatttttaaaatcaatgccctcggacatgagatcgttttcatcggcagtgtcgctctgttggaagagatttgcgaccagacccgattccgcaagtgtgttacaggaccagtggtcgaaatccgatatgccgtgcatgacagtctgttcacagcatacgactacgagaagagctggggtatcgcccaccggattatgatgcctcatcttacgcaatctgcgaccgacaacctcttcggtgacatggcggaggtcatcccggacctgaccaagaagtggagtgcaggaaccaagacacgcactctgctcaccaaagacttggaccgcctccttcttgcatcctgcatgcaatgtttcttcaaccagcgggtacacgtgctcgaaggcgccgagccacccatgctcagcgcgatggacggcgccacactggaggcaatgaagcggcccacccgccccaagttactgaattggcttgtataccagcgccgattcgagaaagacacgaggaccatgcgcgatttcgctgcgcaggtaatcaaaacccggaaagagcagccagagactgcccgcaaggacatcctggatgcgatgatgaacggcgccgacccggagagcggcgagaagctctccgagtcgcaaattatcgatgagattatctcgatctttatcggtgccgctacagcacccaacctcgtatcctacgccctgtactacctgatggagaacccgagcgagatcaccaaagcgcaggaggagatcgaccgcgtggtcggcgacggcaatatcgacctagagcatctgcagagccttaattacgttgaagccatcctacgcgagtcgatccgtctttctgccaccgcgccgggcttcaacatcgagcccattccttctgacgataagagccctgtccttcttgccggtggcgagtaccaaattgcccacaaccagcccatgatcgcggtcttgagtcaggtcaaccgcgatccggctgtcttcgaggaccccgaggccttcaagcctgagcgtgttctcggcgagaagtgggatcagctccctgctgccgcgaagaagggcttcggtaacggcaagcgtgagtgcattggcaagctctgggcttggcggtggtcgttctttactctcgccagcattcttaaggagaatacgtttgagctggcgaatcccaagtataagcttgagtcgaacggtgcattcagtatcaagccgcttgagttatatggtcttgttagcccacggaagtaatcttgaaattgtttttttgttgggattgggtaatgaatttgtcgatatagttacatcaacgttatgatgaatagatcttagaatggaacaagcttaactctatttttattcttatttctatctttatttgtgaaacatgggtagttcctggagatgggctcattacgtggcgactacgtagtaggcgattgcgtatatacgccacgcggacaccccaaagtaagacaagtaaagagaggaagttctacaatagaaagaagcattgaaagaatgttttgtatttttataaccaaaaaaaggaccagcctaaaagtctctatattgacatagaagcagaaaccattccagctgggtgtagaccatcctccgagatagaatgatcaagagtctatcttcaaaatcatatcaaatcaaatctcaaagaaaacaaaatttatccgctgtaatcaatggtaacagccagacgaacaggaccagaggccaagttggcaccaataccaccgacatcggtctcagcagaggtgtaagcgttattgacagtagcagcgtcctgggtaaccgaagagcaaaccgagccaagggcatcacagatctgcataccagagatagacagaccagcattctgggcagcgataacggagacatcgaagccagaccagccactgttggtagtggaaccgaagtcgaactcgccccaggtagaagcgtagccaccggaggcatcagtagggatagtggatccggaggcggcgacccagccaccattcgagtcctcgtcgaaggcaatgtagacggtctcgccagcggcaagagtaaaggtgttacaggcgttgccgtaccagcctgtcatctggccatccgggccgtacttgttgaagatggcgacggtccagtcgtcggtgttggagcccgtgaactgcgccacgtatttgtagttgctggcggacgcggcgtcaacggtgatgatgttgctgccgtaggggttgcccacgttgccttcgtaggttgcgcctgagccggaggagctggtggagctgccgaagccggcggtggagtacgagccgctggagggcgtggaggtccagctgctgccgctggcggctgaggaggatgtggcctggcggcgctcaagggtggtgggtagggccagggtgctggtggtgagggctgcgagcagcaggagagacttggcgaattgcatcttggtgggtttgtgtgttgggagtgtgttgagtcacaaatgaaggtagataacccagtgaagatatgaaagagtgttgtgtgtagtggttggattcgaaagaccgtgttgtaaaggaatgaacggtagtaccaaaaggagtgtggttgcttgaaggaaagagaacagacacgagggtcaacggcaagggcaagtatatataccctcgaaatcgacagagtcttctccccacccgccacgctcgcctcgtaggtcgtaagtaaaagatgaaccgaaagttccgggtacctggctccatcgcagcgaaccactcgcggtgcgcacttgggcatacgtcaaaccgttgaaaggactcgtatacagagggttccacaaaggtcgaggccgtggatttgatatgcagttaccattggaggtgatctggggttggagtagatacataggtataatctgattgggcctatctgtgtacattctaagccaccaatgaatctagaattcgagatactccagggcattcttcattggctacccagtaaagagtgggcttggtcattgattatatccatgggcatctgatgtctagagccatgggtggacccggagcaagctctgaattaaaccagggaggggagacactttccagggtttcctaactaggtattctccgcatctcaattggtatacatccaggatgagggactacatgacaatattagtattgcagatacgagaagcgaatatgactgcagaatggagacaaggatgactcggcctagaaattcaaagtttgcaaatcgcattgtctgggtccaactccaaaagatgccctaatgtgggcccaacggggatcagatcgttttggtccggggctaaaggcaacggaactaccaggaactcagatccgggatgattagaactatggctgcgttatcaaggtgagctattgagacgcgtaataataatatggcattggcattggcatttaacattttgctggttcatgggagtatgtcggcctttgaagtcgattgatgggattttgtagaatttggctgatccgtggaaatgacgttgtggtccaggagacaaagtagcatgattggctgaatatatggacctccgaccaatcatagttgattgtattgtcttggcagggcatggcttgtatcgtggccaatcagaaccaacccctgttacaatccatggtttcccattctgttccttgaattctcttcatttgactttcttctggaaaagtcgcttggcccttctttatatgcaagccaccatcttccttctaccggctaagatttccctaggtggatcgtgtgattctttctgtgttccacttgctccacggccaagtcctaacccatgcgaattcggagtaataaagaactcggtgtttgaagagcaaaccttggaacagaccgcggggttcacgttgcaatctctcaaatgtggaaacaagccatggcatgttgggtccggcaatcgtttcggatatttgaacgaagattggtcttttttcggcttgaaacggtggaaaatgaaagtagacgatacacaccaccaagccctaatgcgatgatctctatgagacttggccaaaattgtgggtttctgtgacaaacgaaaagtctacacatgtaaatctggaagagtctagaaagaagttcagggtctttcatcttcaatgaaaactttgatttctgaggccacttttttttactttcaaaagggcagtatctattgcaattcgctggtgagatttgtgcctcaataacccacaagctaggaggcgttctatccactagaaccgatgacagaataatagtcgcaccgagtcagtaacagtcaatttcggcgctattatgtctgtttcatcaggccattattatacgacaatatcacgtgtagacactgcccttctcgactcgtggccaagggattacttccagggatttcctaatggcaaagaccaatcaaccagtatcagggctccaggccgtcccactataatacaggacctggccaattaaagtggcggatgaaactgcagctatgttgtagagatgtgtgatttgtataaatcttgaaacacaaagtacaagtcacacaagagatgcgatgctgtcgatttgattagctataaatccaaatccaagtacaatttctcaagtcaaagttcgggacttcagaactggaaggttgcaaggtattggtaaaccacagagagatagatgagcaaggaagacaagatcattactctttggttatcacatagaaaattcgtctgtacgttgtacgcctttccccgccttcgttactagtatatatcgtagtgctaaatcccgcatgtttactccgtactactattcccgttgctgtacttctatagctaaatattatttctctaaccaaaagccgcaaaaaaaaaaccctaaagacataatgtcttttaatcacttccaagaaaaacaaccaaaaacatctgaaatgttcagcagaaaggcggtgctcggcgctgacgtcgatatgcagatcatcgggccaactccgagaattgacacacgccataactttagctggaagtccggggattctgtacggagtataatgtccctgaaaaaaaggcatgaggggtctataccccacttccccagccccctcgcataaatgcctaatctccccttctttcgaggattgttctacgtacctagcactatcacaaagatggcttcccagttttcctcgctagctacactgctactcctaggatccttcctagtgccagtcagcgcgagcaagattcctgctcaagcgcagttgattgaccaaaaagccttcaatgtcctggacacgacccaacccccaaccgaattcaatgcgaagagtgtacgcgattcctcaattgcggtttccagtagccccttttactgaccgatgcgtagctatttgtgcctccagggtcgacaggagacagtctagcccagcggcctttccatatatacgacaaggaatttctgaagatcatcggagaagctccaactctaacccggatcgcacattccccaaaggaccctctattccatgaagcagttgtatggtaggtatccaacacggaaataagtccaggccaagggaaaatagcatctgactttactttctaggtccaaggaaacggacgaggtgttttttgtccaaaatgcaggtgctaagaacgccagcaccggtcttaaaaagtcggctatcattgagaggatttcgcttgcggacgctgctgctgtctcccagaagtcggatgccgtgggccttgtggatgtaaccaccattccgtcatcgccaacgattctcaatccaaatggtagatgaccagctcttttttggtagttaaagataactaacggtgctcaggggctaccaattaccggggacagatcatattcgccggcgagggtcaaggtgactatgagccccctgctttgtgggttatgaacccgagaagtccattcaacgctacaggttagtacaaaccacctctttgtattcctggattaacaaagcggtctgtagttatccttaacaactacttcggccgccaattcaactctctgaatgatgtcgccattcacccgaaaaacaaagatatctacttcacagacacaatctatggctatgtgcaggacttccgccctgcgcccggtctgcaggatcaagtgtaccggttcaatcccgagacaggtgctgtgaccgttgtcgcggatggatttgaccatcccaacggtaggagatcaagaatttgtacaagctcaaaaaggaaagcgcaactaacaatgtaacaggctttactttctctccagatggcaagtacgcatacgtcaccgatactggaattgatagcggttttttcggtctcaatttcacccgccctgcttctatgtatgtgctagttttcgcgatccactgattggatttgaagctgattatagactgtgtgttacagctaccgattcgatgtgaaagacgacggcacactcggcaatcgcaagacttttgcttttgtccactctggtgcacccgatggtaagttgggcagtcaagcaagctgaatttatgatgttgaggctaattcttgaaaaaggcatccattgcgattcatggggtaacgtgtatgctggctgtggtgacggcgtccatgtctggaatccatctggcaagctcatcggcaagatctatctcggatctggtacggcgaatttcaacttcgctggaaaagggagaatggttatctgcgccgagacagacctttactatgccacgttagctgcggctgggaattatgtcgacagtgagatgtgagagccagaggagtggctgtagctttctatatttagtcaaaaataattttgggtgaacaggaatatcataaacggcagtcattcggtggttcatagaacgaagcgttcgctaagaactgaaatgttgctatgaatggatttaccagacttggacatactagtaccaattatacacttgaactgatttctccgtagatcgaagatactactattcaaagtccatgctcaatagacatcatgtcttgataatataacgatggcctcgtggggccattaaaaagaaggattccatctggctgtcatgccatcttttgtagaaaaaagttcgagcattgggcaaggctcggaagaaaagtgccgttgctagacggagctccattcaagctaggtgtatacccaaacaaactataacaattagctctattggtgactcgactcaagcattcgaaatgagtctccaaatgtgagttcgccaatgatgtccgtggccatgaacaaccaccatttgaacacgtcagtaacgccatgagctatgatatccattgtaattttttccacagctatacggacacgattggctatcagtggctcaaggcgagctagcgaagagttagagatgggtgacgctaaaagacgccggcgatgggtatggaagtgtctgtcggtggttgaaaatacagtgggttcattgcctatggccagcttgcgatagaaagtagttttagagaattggctattcgtcttgtgggtctcctttactgcgtcagtgtcgcagatatcgatctgatctggaatgattcggacagtcgggcctacttcaatgtcaggtatttacttctcataccgataaatgctggcagcacatacaatactttccatgaagttgatggatgtacatcggtaccgtcccatttaaccaattgtatgtatagttggcatcggtgcatttcgatatttcgggccccggtatatgagacagagaatttgtgagtctacgatagatggtgctctaaatttcgtatttcagtaagacagtaacattgcatccccgtacgaggagaatttgttataccgaccagaagagcagcaccaataatgcatattagccagtggctaatcagaaaagaagtagataatatcccgagtagctccattatatgctttggggaagttgcttctgatatggaatcaagcaactattactactttcgaaatggtgtgctcgtgccgaattccgatattgcacacaacttccagctgtattattgacgtccttggtgatttgttatttctactattgttggcttgggtgtctaataggttggatgctcattagatcagatcattactacatggtggaatcacacaatatagggtttaactggtcttcacggctggggatggtcttgacaacgcctgtctcgtagcagcattattgaagttgtttgggttgattcatagcctcataggattcccctcatatatgcaaagattgacgattttgatatgaactgcccgggtggtctagtggtatgattcgcgcttagggttaacccaaagcattaatgcgcgaggtccccggttcgatcccgggctcgggcccagtcatcttttttttctttttctggtcctttacagcatctggagatgccacagattgtccatgatttgaagggttaaaaggataccctttttttaacttgcggcacacttaaaactttcactaactgctttaggctattatagattgcggggttagcgccaagtactttctaaaagagaaagtcttgtgcactactccgtacttggagacgtactaatggcggaagtcgttctctatcaggggaaagagagcctttgctgaatgatccttaaagttcaaggttcaattatgctattctacagtcgctggatttttgctttcgtttctagtcggaaaaaattcattgccatatttactcacatacgatttccagagatctatcataacgataatagcgctttagtctgcgagaactagttctatctcgttggaagagggaacaaagatttgaggtctgccaccattatcatcatctgtaaagtccgacctcgtgctttgaccatatcccctgaaagtcacgatagtatcagcatgggttccatctttagtgccccaatcccaccacccaatcgttgcgcccttgaacgcaaatcggaagatcgcaccagttccgagatgatctgggaactcccagagctcatcatccacggtgaatgacccttcccagctctcactcggatggagacatacaaagtcttcactttgagcaacgtgaatcttggaaggttgatcattcacaaaaccgggacaataatcaccatatctgcagggaatccactgttcgctgccaccctgaacccgtcgatctaattgataatttaattcatcacggaagacatcgatgaagaaagtaagggggccggcagtggtaaaattgatattgttgacaccgtgatatgtcattttgtatcgaaattccatgcttatatcgccgttttgtcgcttcaattctgtggagccattctcggtttccagcgacacactaagtatgggcacgttgtgtctaatagaacccttgcttttgattgttgtcagcataaaattatatatattctagactgggaaagcaacgtactccgaaatttgggattgggatggcataatgatctgtggccgggaaaatgtaagtgttcagatcggagcacggaagatacgtccagagtcatgggacctcgtactcgtaaatggttagacgaatgccgtgatccttatctggcactatgtattattcttttcgcccattctgtagtcggatttctgagacaagcgtctaatcaccgactgcaaatattttcttgcccgttgacccttatgctttcatcactataggtcttgtgccacttggtgtctattcttgtttatcctactgatagcgtgaaaagtgtcgaacatgcatttttccaacagtgtcctttccttgcattctactcttgcccagtttatcacctcatctttttgctggccgcaatcatcgcccgggttttagattccgcttattatctcgcgagtgagactcacgttcctaggatcatatctggccctaggacccatagcatggttcttaggcacgctcttggtcgctccatggatcagacttgtagttcccagagattctacagctcccgggagtggagaatagagcttcggggaacaagtgggttcccaaagctacagtgggatcacccatcggataatatttaaatcaatagcataaccatacgttctacatctgttcctggccccctaagcacgaaccccggattacgagggccctccggaattaaaaaatgattcccagtggggcataaggaatctgtgataatgaacaataagctcaagctgcatgtgatacacgctgtctatatgagatggatgctggtgctagctgcggctgcgcgaagggtgtaccgtgtagcgaagtgtcgacgatgaagagctgaggacttctataacgtcgaagaagtagcagcgatgcaagagaccgggctcacgtaacctcctgaggtgctaagattacatgatagtgatactgatagagatgaatgctatggaggaaggtctgggctataagagagccaagtaattgcttgaacaggtagtcagctacctaggtctctctcctatgtatacacgacgtagggagtgtgacatatggttgttcttacttttcctcttcccttccaccctcttgcgctgtcttttctactttctttgttaagcctttttcttgccaatgcagcattttatccaagacataacaaaactcatggtctcgtcaattccccactttgaacccgtttgaacccgtttgaaaatgcagcactggcggtctctctccccctcgcccggagatggagcccggactgagccatttcttttatttggagatatccttactcccggatgatgaggcacttaccaatcggtactgcggagggctgcggcaagcgtggagtttggagacccgtgaaacaatacctagtcatttagcagtccagtatttcccgggtatggacggagtttgctaaacggggctgtcttttgagtgattacccacgagatgacagtgtcaccattggtgaggaaagttaccattttcgaattggcaagccgaaggaggaccgaagtcatgataatcggattgttgaacccggacctcaactctatcaacccatgatagagttaattcactacattcatcttcgtaatatgcctcaagcattagaatatcgcattcttaaagccttggaagcataatatactgccagtgatctagaaatatcgcgttattagcccgtacatccagagggcgtaaatttcgaaacgaccgtaccgttgtccgtgaattataacatgcttctaggattcctattttagctatttccttagctcgctcatgcatatccataatgttatatttaactatacgtatagaagttgaagaacaaaaaaagatgagtttttgtattgatttcggattttaggatatttgtgcgggatctatgtatacttattgttcttcaacctaaattagcgaaaaaaaacaagggtgtggttaatatgggcaagtacgttctatcggccgatctgcagaacttttgcggccctcacatattcttgccatctaatcaaaatgacatttcgcatgacgcttttagcatttccatattagattccttcaatttaaaaagaagaagaagaaaaaagaatgggcccgagcccgggatcgaaccggggacctcgcgcattaatgctttgggttaaccctaagcgcgaatcataccactagaccacccgggcagttcataccgagaattcccacatttgcctacaagagactcaatggaatttgctgacagcattctggaggcagacccaaaccacaaagtcaaacgctacccagcttacgatccaagccaagacaatcaaaagtattggcttccaagggttggccgtcccgtagagaagaatcttgttaagttggattgatcaatctagtgatgtcaatttacgagttagatactactagtggatctcttaacagcactgcatggggatctaggtatctgagataagttagcttaatcggagggcagatcttctcaaagagctaccatacactaggggcatacataaagcacacgatgaagctaaataccgttctgctagaaagatgcagagccgggctttcatgtagatataacgaaaggacgtatgtacaggtgttgaccagtccgagagcatgtatttacgcttgggtattggaatcggcctttatgattcatattaaaagctaggccaagttcaagaatacctacatatagtatgagccactcgcgctatacgacaaggaaacatacgtgagatagagcagcttcctcgtagaacgaaaggttatgcacgagaaggctgcttcaatatcctgcttttacaaaattagcagttatcctgtatgcgatgcactggtctaagatctaccacaggtcgggcccaaagaagtcgaagtcatatctctgagtccgatagagctcaggggagtatcgggcaccttgtaaattttgtaattagaatgccctcagggctggccaagaagcgtgactacagttcatcctgcatgtctttttgctcgagttgaactctttggcgggatcaaggtaatgcggtcgtccgtgtagaaagagccgggctgtgagataccccgacgaatggtcttggtcaatgaactcaaaatgtctccttcccactttccgtagtcacccaatttcccaagtgatgccttgatatctctccagatttgacgtcactagaatgatgtttccatagcatcccttgtgacctacaacagaggacccctcgcgagcgtttcttgcatgtggatgtggatatcgctggccgggtggataataccggcgtcaacaatgggttccagtggcaatacgagcaaaaaaagcagaatgtatgaatgtattgttacgacaaacattccatcccttcttctccaacaatgcccgagatacgaggtacgtaccggcggcgttgcgagagttcttcgcgggtttcgccgccaacggtgaagcttcgatcagtactccgtacggggcattctcgtttcccacggagtcacgggtctcagtggagtccgtcttgatggcaagtgcaaaggtactgtgatccatcaacacacgagaagtatccgggtctcctctttccaagaacaccagcccccaaaatatagtcttcgaattcttccgctttagattaaatcaccactaggatgggagtaatcagccgtaagcttttattcaattggccaaagagatccgaacaaactctggggcatggcgatctgcggaatgagctcataaagacgttgtggggatcgagaatgacgtggggtatgcagcaaaagacaactcctccttttgctcacgagtcatgggatgaggagttcgagcgttcgagattccaaagttgctttccgttcatccatgtaacctcggatggagtttgttacatccaagcgaagggccggtagtcatagtgatagctccgcactccgcactgatcctcttttagtaccaaagtttggaatggatcgaatcgatgatgtctcacctggaaaaggagaacccctagtttttctatagtgccagtggggggcattgagttcactagcgattgcgaagatgtggaagcgcattgtacacgaagtgattaaaacttatattattatgttctatcatgagatctattatatcattaaccaccaaattatgtccaatcagattatgtccaatcaagacttttcttctctccaacaaatctttggcttctccaaatgttccaacttttttgaagagaaaaaaatgcaaaatgcaaaaagtccttacttggccggggccgggctaagcttcgcacgtagtcgcgctccgaagaagaagaagctgtagggaatgagaaccatagcaagaccaatgaaagcaagcagccaagaagcccactgcaagccgagacgatgatacatttgcgtagtgaacagcgggaaggctgcaccaccaccggaacgcaggaagaccttggctgccaaggcggatgcagcgtacttctggtaagagtcgatgatgtagttgttcacagagtagtagcacaaaaccatgccgtagccgaaggcaatgcccgatgaagcagggccgacccaaatgatatgcttgtaggaggtcgcgcccaagatgaacagggcgatcgggatgaaaggcgaaccgagcaaggctccgtggagtcggtcttctggtgtgggggctcgcgagtcgcagattctcttgaacttgtgctcgatgaggggagtggtgaccagggcgaaaccggcgccaatcagaatggggatcaacatgagaccgatctggccgtcgttatagccgtggagctcggtgaagataacggggtatgcgaagaagaaggcgtaaagcatggcgtaaatcagcacgatgtacatgcacattaggtcgagaacgggctcggtcattatcatagtgatcggtcgaatcaagctcgtctgagcgatttccttgaatgtgagcttcgtcttttcttgctcggtgatgatgttggggtttccagtttctttgcggagtctggcagcgcggcgcttaagaatcacaggggcatatgtctccgggacaaggcccatcagaaccatcatgagaccggagaaggccaagttcacccagaagaagaggtcgaggcggccacttccaacgttgatccaacctgtgacgatggggccaagcacagggccacagtaaggcgcagcagcaaagtaagcaatggccatgccgcggtcctcaatgttccagatatcggcgatagtgccaccagcgagggaaagactcgaactagagaagacaccgcagaggaatcgacacacaagcaagccaccgatgtttggggacagagcgcagggaatgttgaagatggtatataaaagcatagagatgatgtatacaggttgtcggccgatgatctcggagaggggagaccagagtagaggaccaactgcgaatccgcagaccatgatggaacatgtcaggatagcgacttcgagagagacgtggtatttgtcttcgatcaagcccaatcctccggtgacgatggaggatccgaatgcaacacacaccaccagcatcgaagcgaccatagtgatgtaccagcgatagatgcgattccagttgtaggggtgttcggggtcattgatggtgaatgttacgaactcggcaggcccgccctttcctcccttttcaacgtcgacgtcggcgtcattgtcgtttggtggggcgccgccgtgttgcgtggaggtcgtcgaaacatgggttcggatctgctccagagttgtctggggaacaagaccggtattggtttccacggtatattcctcggggaacacagggtcctgatcatgtccaatggctgggtaattgtaatccaatggtggaggaacttctgaaatgccgcggtcggcgagagtctctctggtttcggtcctggatagacgggaattcaaggcctcgagacggggatcgagactgcgatccaagggctcggggttctccccctcttctggtattgttgagggcatcgtgagtgtgggagattaattagggtatagaaatagaaaagggctgtcgagcctatatatgagtggaaggactgttgagtctattggaacatgccaggtacttgaatgtaacacggcggatacttatactcccaaggtggctttgtgagagtgtcatacttttcaaagccgacgaatggccgaattagaccggacgatccccggaaaaagggcggaaaaaatacgagaaaaagacgaaaacatggcagaaaatggctcagaactgtggcaatgggggcggcaaaatctcggtccgagtgaccgccgacctaattgaaaaaacgacccacggatttcggagtctagcccaactttaaattgatgatatcactgccgatatgccgggcccgtgtatttggtgtattttgtgttttgggctgtgaaaatttcaatccgatcaggttttttagaggctcgagctctctccgccctggacgtgtctgaatgtgtgacgtgctcgacccaggccggacccatctcaggcgggggggcatggcagaattgggatataaagtccgtcttcgaattccggtctggggtttgttcatttctgttttcgaaccccataccatagtgaattcattatacggagtagtactgacttccatagcttcctgctcgtttaatccccgtcggggatgataccctatcttcgtacttattttccgtcagggcattcttcatttgggacctgatctcatattgacgctaagcagaagtccgccaattgtcgctcgcaaatctgacggcattctaattaaactttcacgtttcatttggatcttcttctgaaacaaaaagaaaaggagaaatatcaatttactgtcattcgcattcaaacgccggtatgctaacaactcattggataatctgaccgttaccacgagaggtactaaataatgcctaactcgatattcaaaacaatgcaaccttgcttgaattatatccagacaatattcctaatcctttatcgttgctcctttattcagctatcgatctactgctgcaaggatctcaatcaggatcgcccgctatgtatgtacataggtacactatcataactgcacaggtgggtcagtgaacagaccttaaagtgagacgaatctccacccattgggccgtaaaaacctactgctactaaccacaactgctattcagataatgataattgagctgtgaaggccgatataagccagtatctctcgtagacgaattcctggcactacaagatgactagagttagccgtcacctgtgtctggcttcaaattggcaaggatcatttgtaataataaaattggtgccctacggcttacgtgtgaacagaaatatgcattcgtacactaactaatccgtacacccctatatctctaacatggtatatactccgtgttgatgttttggtgggtcctgggcccaaaaaaaaaaggaatggcgccacccggaatcgaaccggggctaacacagatcattgttataccacaatgtgtcgtcataccactagaccatggcaccctattgattgattgttgacaggaaatactccataaaaggagcttcatcgactccacaatataagcacaactacatcgctagttaaaccactcagttgctattatagttgttagatatatgtgatgtaaatctaaatgggttccagtcatgactttaagtgccttacaaaatgctatgtcgcttatagatgttcgaaagagtaagttggttgcagatatatatctacggggttggagttatgtcacaactttcacaatttatggacaatcaccggtggatcatataaagtaactatttgcaattgaataagatcaagtccccatagaaaactcaaacagcacgcatgacactgcaattattccctcaacatgtatccagctgtaagatgaaacaaatccgaagaaacgacctacccgacccaaccttaatggtaccctcccaaaggtcatgagatgctgtgtatagtgataagctcagccacatgagccgagtagccgggtatgtattggtttctatctaaggtatgcaaccctaagtaatctttgttcgcttgttcgtaaacccagaatctggacgagatcgcttccgctccgttgcctccatttcagctctcataatcctctcctgttcagtcattttcttaggagctgcgaatatagagcccttcttcccagccaaagggttcttcttagccatagcaaacacgttcttcggcttttgtgcacccatggacatcgaaatcttgaccggtgcggcaggcgcagacgaagcaggagcgtcggtgcttcctgtcggtgcatctgtttcttccagcgataccgtcgtcgttgtcgtcgtaggaggcgaggctggcttcgtatctgtcttcttcgagccgagtccaagattcaaggtcatcttttctccttccttcctctgcaataatcttgcctcgggttcagggtctgtcgtagtgccgctagccatcgccgcttgttgggctcgtttgatctgttcctgaattaaacgttgctctcgttcttcgtctcccttctcctggcgttctttctttaaaatggcctcccggcggcgaagtgtgtctggactgttatcaatccatgctatgaccaatcccttatcggtttcctcaacccgacactttccctcacgtcccaaataggccgcaaactgtgataagcttttccattctgcctcggaggttagtattagtccttgcctctcctctccatcgggacatacctgtgctgttcatgtgaatgtgctacaagaaagtcagctagaacgaacaggacaacagtgtaatacaaaagacatacctgtttatcagccacaatctgattatagaaatgattgacgttgataggtttagttccatgcgtagttctgagggtgtcgaggaaagtgcgctcaaattcgcgactaaactctctgatgtgcttgcgcgggtcttctccaatgagcatcatctgtcggactaatataaagttagtcggtggccaggacagaaaagagaatagagaccgtaccatgcgcttcagtcatagtgtgacatttgaagccgttctcatctcgacattgtttctcacatgcctggcaaaaccatcgaaggcgacccaatcctttgcttttgatcttgttgccgatggcttttgtactgcctggttccgcacgacccattttgtaggtcggtaaatgaaattaacgtaagcgttcggaggaggcgacgagacaaaaatgcttcaaaggaccaatagatcggaaagatggtgtatgttgagaagcgtttgaagaaagtagtgcgagaagctttgaggtggcgcagatcaacgcgataagccgatcgattacataacatatcacatgacatagccaaaaaggcctggtcccgagcttccaaaattggttagttgattccttaattcgatgtcgatatggatgtatacggagtatcagtggatgaaacgaagctgaatacctaggttcattgaaatattccgacaaaatgaagcaaaactcccccaaatcctacgcctgcatcccgatatcgcttttctacctaggatcatagcgtacgtaaagaaagatgtattccggagacaaaccagcaaacctcgccaagacgaaggtatgtagcaaaaaaacaaccaaagaaatgtgccatgaaccaagatggatattaaatcaccgagtctgcaagtattacaagatgtactcgtggattgcagacggcccgctctcgttgtactcaacacggctcatgtaacccttgctgagaccctgatcaatgacaaagaaaaccttggcggccatctgagcgccgaggaaaatggcctcttctattccatggccaccctgggatgtgccggacgctcctgggttacccccagcactgccaccactggcgccgggagcgttgctgttgccctggtctttgaagtccgggaaatactcaggaagctttagagtcttgactgaggttggggtttgggagtggccggttgagcggtagtgtgacaacatgccggggtccatggagggcgtgccgggcataccggggttgttgtgagttgcagccacaaggagagggtttactccagctgccgaggggtggtacatctggccaggagcgggtgtgttggcaccggttggaagaggggtggtgaagttcgaaggaatttcagacgtgaagatggtgccggatggagaaagtatgaacttttgcgtgatgacagccagcaaggcctgtgtgaaacctgttttaatgttagcgaaataaccgaactctagatagcaatgataaaacatacccttgactttgcttccacatccaacgataattaaagagtcccaaagctcgcttcgctttgtagcatctggaacggcaagaatagtgtggtgaatctgagtcgcaatgtcctcgaggataccgctggtcaagcggtttccaaccttcgagcgcggcgaagtcaaaagaaaacgctcaacactgacttcaatatctcgagtacgacgagtgtactgccgagcaccgtgggctgcagccttctctccttccaccggaacaaattcctcgaactggaaggacgccttctcttttttcgagttaggcaggcgggttcccttggggtcagctgcgcctttcttggtagttgtcttctccttctcgacattggcaaggtattcagtggggttgccgctgacaatcgcagcgacatcgagaacaccctcatcatcgtcaccattatccccctctattcctgtctgagtgccgtctcctggaccgcgcggagccgactcatctccttctgatccgcccgtcgaggcaacagcagcagggttggcgccctggcgagcagtagcagaggaaccaggcagtggggttcctgggggaagaatctcagtaatattgcttcgcttgagttgctcgcacatctctctggtaaatcccttcggacccagcagctcaacaagacgatcggtcatagcgtctccaccacacccctccagtgcgattcctctgccgtgttcgttgaccgcgaagtcggtcacagcagtgacatcaaccttgccctttccaacatcgacaacagtggcggtaggtgtaccatagccgtagcaagccgcaagagcagagtccataagactaaacgcgggtgccttaaacttctcgaagacgaattgagtgatcgcttcgcgatcgcgtgcggaccagacgggctgaccaacaagcataatcggagtgtggaaaggtgggctcaaggtattgtggatgtgagtgagcagggcgaagaaacagggccagtcgacgatgcgcccgttctcgatcggatagattgccccttcgtcggatgccaggtcctcctcgtagaagacttcttcaatagtcttggttgactcgtcattattctgagtattttcgtcggtcttgacagtggtcccatcagcagcggattcagcgtccttcatctccacgtccggctttgtgtccgtgccattgttgaccttgacctcttgacgtctctcgagaacacggtaaggctcatattctcccttcttctcagcagggaacatgcgcgttgggaaccgaaatcgcgcgggcgtgaatgtttcaggcaggccgagctgcgccaaggtcatttgcgaacccggcgcaattagctagacgaatggttaaaattgaacaagaaaatatgaagaactaagcttaccaagatatgctcatccttgaagggcggcatcgttatcagtggcagtgacgagcgttgcgacgagtgatgactgcgagctccgctcgatttgcgttggttactctttcttcccattgtggtttagcgtgatttggacgaatcggagtcggtggttggtcggggaataatgtttccgaagttggagagttgaggtctacttctgcgaggtgacaacaacaaaccgcgatttacgcagccagaacgtattaactctggaatattttgtcaataactataggtgatttgttactttattgaatttaggattgtaaaatgaataaaaaatatgaaaatgatcgaacatgacatagctatactatttacatagacaggatattacgcagtacaatacaatatacacagaatttgtctataagctcagtcagaataagatctatagatatcctccaaacatcatgatggctagcaaactcggttttgattgaatatacgttgtatgccgttcggtcttctatagagaggtagaccatgcctgtcaaacattcaaatcatatgcaattaactaatgcattgtgcgctttcacgccattaatagtatatccgcccacagcctatccccctaaagcagagaaagaaaaaaaaatctgaaaccatatgaggaaaaaaaactccagacccacatatccggtggaacgccatcatcctttgcactctatgaccagcacgagtctaaggtgattctattctgggacagcatggtatttgtcagtcgctgatcggaatagctcctgctgttgccttagaagctcctcttctgtcagaccactttgctccatcttgctctgcttcttctctcgtgactataattcagatgagaggtcagcctgcgctcgaagctatcacaatcccaagaaaaatatgaacataccttcagctgctgcttatgctcttcggcaacagcgagtacatcggcaatataatcactgaaaccgagatcccgtaatgccttctccacatgttcacaagcgatggtcttcttggcctccttctcgctgatatcgtttgcttcggaggagatcagtgtaataaattcgacacagcattccatgagcaagtcgcgcgcatccttggagaaggtttggccggagctaggtggtaaaatctcggtgataatcttttggaccgtcgctattagataagttagcaaatgctaacaaacacgtatgacaagtgtataggcggtgaagcggtaagaacctcaaaaagagctgtacacattcacaaggttattgtaccgtacctttaggcagagataggtcatcgtttgctattcacgtacaggtcagcaggttgcgcgtaggcggccaagatctagagatcacttacagttgaattctcggtcagacatggcgaatcagatgatatagtgatagacaacaaaagaacaaatgtcagatcgagggagaggcgcaaaagggatgctttaatttctttgatcttttgcgtggggctcaaagtttcaaggcccatcgcaggcgcgcgacggagttaagtacaatttcttgccggcagaatactaccgctttggaccacataaattgcgctgaattttcttttccgttgacatcttcttcatcagtcttcaatctcctccaactaccttggaaagagtccttcaaatgagatcgactccttccgaggccacacactaatggtaagctcttgttcaaatcccttttcccaatttctatcatgatgaactttgcttgtcgcccctatcatacattctatggtgaccttacctgtcctagccaaacggactatctgatctctatcaattctgcacatttgcatctcacttcatttgtttgaaacggttgctaactttattgaagaatttgcaggaattccatctcttgttattgtagcttggaactcgtttctgcttggatgacatccacagaacacatttggaggacggggatatttacatctgtatctaaaggtacgcgcataatatttgctatattttcagttccaattacatgatgtatacccttacattccatgctaaacatgaaggtgcactgcgcctaatgcttataaaatgtattgcttttcatctttcgactgacttgtaaaccattgctgcctcacatttacattcattgttctatggcgatcgttactgacttgctataaagattacagatatgaaccagaattttatactagctatcaatgatattattattcctggaaaacctcgagctccttgtcgttccatctgccaattattagtatttctcgcgtaatatgtgtaggacagcacatacgaatagaaacgaccgctgatttccttgggcgcatcgagtaccagcttggccatgacatggccgggctgctcgggtttgaggagcttgccgttcttgtggactccagtgaacttggagtgcatttcagcgtccaaggctgtgccatggtcctcccgcagggcacgctgcatctcggtgtcgaccataccaggtctgatagacacggaggtgacatcgggttcttcggcacccaggctcatggcaaagttgttcatggcggctttggtggcagcatatagagcccaaccacggtaagcgttgactgcagcgccggaagacgtgaagataatttttcctttggactcacggagagccggtagagccgctttggcctagttcccgttagtagtgcatggtagatttgatgtaggtcccgtacaaaggcaactaagctgataaagttgacatcaaagccttccttccactgctgcggatcagcgtcggcgattttgccgacctggcctagcaggccgtgattaaggaccattccatcgagctgaccgaaggtcttgatagctttatcgacggcctgttgggcaagagaaaagtcggacagatcgccattcaggattgccacctggttgccgtattgctccttgagcttttggaggggttcaacgctgcgggctaccaccaccacattgtgggattgaggtgcggtgagcagatacttggccacagcaagaccgatacctggttgatgtcagtctatcattatgcacaaagtttgaggggtgtacctcttgaagctcctgtgacaatgatggttttggctgccattttggtaaatgctctagtcactaggtgttagtggtaggagatcaacacagtgacaaatgtaaagagtagatgctagattcgaaatgatagcggcaatgagaatgcatgacaacaggttttggtattgctttgtatgccaagagacttgcataaacttgctcaagttgtctcggatatatatctgaacagctctgcaaagctaagaactcaagcattggggaatgctggttgggcagctggtgtaacctactcgatgtttattctgcagatgtcttgagccgaatatcaatactggtaaggaatgattatatgaagatggacacattgacagagcaccgagagaggtctagtgcggggcttattaatctcgtggggtcgatctcgggacggtttccctatatggaaggccgacggacgtcatgctgtatgtacatctttcgttttatagagtagtgtatataaaatggaacctatagtaaggcgtattcttgagcttcagtcaaagtagccgtgtattttgcaattcaaaatgagagattggaggtattcttcttacgtaggtagactgtgatcgtggcgcagcaggcaaatagcttcaagaaataactttaatttaaagattacgcttaaagtttaagatgatacatcataaagccgcacatcccgcagcaaaaaaaaaggtagaaagaggcgttgctgtcacagtggaagcataggggaagagaacttgaccgtatagtgtagctacggcagccacccaagaggggccggtcacgtggtagccaatttcagagaaccggtccgagagatccacccgtcgataggaaacactttcacgatcgcccaaaggagtcaacttttgcgatcagctccttctctactccacagtatttttaagtttggatccaccggtagcgtgtaccatcatctaaaagccatggaattcctcccggctatcatcccagcacttgtacatattcccgggccggtgcaaaagaaaccgggaagcaagatcatagattgccgagaaatataagctcgaacactcccatttgcatgcattaattgcaacccatgctttatttcgacaatccgcgttgataagcgtttctaattttgcacctacaacagccagcatgtcgaccgtcatccttggaggaggtatcattggagcctcaattgcttactacctatctgccaaccagccagaaggcgatattcacatcgttgagcaatccccagagcttttcaccgcagcctcgggatatgccgcaggttttttagctagagattggttcgagccatctcttgcccctcttggtgctatgtctttcgacttgcaccatgagctcgccgcagcggaaggcggagacaaaaaatggggatttatgaaaggaacagcgttcaacttggataccgtcgctcaacgcaagcgagggggtccccgcggtgatgattggttgcgaacgggcactagtagagcagagactgcggctggctccgaggataccactccggttgagtttccggaatggttgacgatgcagaaagagggaatactggagaaaatcagccagggtgaaaccgtggctcaagcgtgagtatcaaaccgaagcgtttcatgaattatttgctaattgtgttcagagatccattgcggctgagccaattcctcattgacggtgctatctcccgaggcgctaagcttcataacccagcccaggccaccgaagtggtcaaggatgcgagcggcacgattacaggcgtcaaaatcgtgtctttggattccaagaaggaatcaataattccgtgtacgaaccttgttctgagcatggggccgtggacaccacaggtccttagagagctgttcccctcttctcaggtatcattcgatataacgcctttggctggctattcattggtccttcgatcccctcggtatacaatggagcacgagagaaatgtttaccgtggaagcagccatgctgtatttacaacacaccctccgtcgtgcgggtttagcccagagatcttcctcagggaaggcggggagatttatatcgccggtcttaacaaccccgccatgaagcttccaccccgtgccggtgatactacccagctttttgatcccgccgagattcgaaagctcaaagatgttgcaattcgtttaatgggggatcttcccaagggtacaaaggaggctaccgacgagaaggccaacacagatgacttggagattatccgtgaagggctgtgcttccgcccggtgggaaatactggtgttcctacaattggaagaattggagattactctttgggaagtgtgaaagcaaaccccaagggaggcgtcttcatagccgctggccacggagcgtggggaatctctttgagcctgggaactggaaaggttgtttctgagatgatcaaaaagcaaaagctctctgtgaatgtgagcggcttggcggttcaggacaaagttcctagttccaagctgtgagcatttgatctgcaataggaaagagctccagatgtccgcctaaatgtgcttttccaaaggtcactgacaaagcaacattgtagctgcgtacttctttaatctcatcgatttcatcctctgagtgcgcacatattgactttcgaaggctcccttgtcggcgttaacaaagagcgatcatcttcgacttagaatttcaatacctatttatcaaactaaatgtcgaagagctcaaaatattcgtttgatactaatacgatcagattggtagactcgacttggttatacactttgagtactatttccctctattttccctctcctttctttccctctcctttctttgacctatgatactggcttgtaatgagatcaaatcaaatatctatctataactcatctccatctcaagtcagtctcgccccggttctaaacctagcgccagcatcgggagtaaaaataggtagaaagtcacaggaaaaggcagactaagtttgggactgcaggtacgctaactcactatgtaactaaccagttatagctcttcctaagtaagctgctttgcctaggtgacagtttcttttccaatatctctccaaagactttttttggatgagttttttttttaaagaatactatcaaatgtttcagtgttatagccagaataatacaataaggatcagccgtgaaatatagaagatatttgggtaaaggtgtgttcagatgtatatctaggaaatttactaggcgtcggagtatagataatccgacggaccgagcagctctccgccactcgagctctccagaatcttcaagcatccgatatctcccagctttcaaagcaccgtcgctttgtgcctgtttcttctgcaaccctcccatccaatttcaccttccatcaattcttcatcagccaatatcagagactgcccgtaatcaaccatggccaactaccttgcatccatcttcggtaccgagcaggacaaggtcaattgttcgttctactacaaaatcggcgcgtgccgacacggcgaccgctgctctcgcaagcatgttaagccttcgtactcgcaaaccattctcatgccgaacatgtaccagaacccggcttacgaccccaagaacaagatgaaccccagccaaatgcagaaccatttcgacgccttctacgaggacgtatggtgtgagttgtgcaagtacggcgagctggaagagttggtcatctgcgacaacaacaacgaccgtaagtagtgctctcttcaaaatttgtgtctgaatctactgacatctgttttcgcgacaatagacctcattggtaacgtctacggccgattcaaatacgaagaagatgcgcaggcagcctgtgacgcgataaactcccgttggtacgcagcgcgacctatctactgcgagttatcacccgttaccgatttccgagaagcctgttgtcggctcaatagcggcgaagggtgtgtacgagggggcttctgcaatttcattcaccggaaagatccgacacccgacctcgaccgcgagctgcgactgagcaccaagaagtggctcaaggagcgcggcagagatcctcgcagcgccagccgcagtcctagccccgagcccacccggcgcagatactagtggtgtgccacgacgaattttctcattgttgtttccctacattcgatcctttggcgttcggcgatatcagtcggtggttcaattccactttcctttgcgcagcggcgcatccagggcatggggtctcggtttgtctttacatttgctggttggcatttgcgtttcatgatatcaaacttgcgcgatcaataaaacccacagctaaacttcatgtataaatctcgcttagtaattccttatatgtaccacctggtaggtagttgaagccgaaaccagtacgttgaccagcacctactgagtgatatcggtcaaggaaactgattcaaagctctctctatagcactttgaatccacaagtcgttgtcagaaaattgcaattgcttcattactaattaccaatatttcaacaacagcacgcgcaatttgactaggagaggtcgacggtgcagtgagctgtgcagtgtcgcggccgtagtcatagatgtcgtggaagtcgcttgatgtttggctttggctttgacaccgagattgaagcgtcgtatgaaaaggagtgcatgctcatagtcgtaatacatcgggtcactcgaagtactgtttcatcttcggctttttctatcacacacataggcagtgcctggtgcgatgcgttttaaaagtctaagtagatggttacataaattatgaatccgcctcataatctatcttccgcccggatggtctagtggtatgattctccgtttgggtttccatctcaaattcggagaggccgcgtgttcgaatcgcgcttcgggccctcatctttttttgtttttgctccaaagttctttacttcaatgtatgaaccagcgcacgcaagtaaagtcaagtagagacaaacaaatcgtctaatgctatcaaaaaccatctcatacgattcacaattagggtggttttctctcctcgtcactttttgtatgaatatgcctcaggaaacaaatttactaagcttccttatcgcatgttcttatctttctttcatctacagccacgcgagcgcgtctgatcgcgtcaaagccagtacgccgttggcacaaagagccttgaactgactgatattgtgaactctgacaccctagagcatgatttatggtcgagaatatggctggatataatgacagcaatcgtgcctttctccaagcgttcatggcacgttcgtctatgacctttgaagatgcgcaacccatcctagctgcgatattaacagtatctggtacctaactcctgcttgatcatggtgctatgaataacggtagttgctgacgttgaaatgatcgaacagaagggcgaacagtggatcccgatgagattgagaaagaccaattctccgactttatagcggcggctaataccgccgtgtcacccttcgacctcgaaatcagaagcttactgccacaagtaatcgaaccagcccaacaagatgccccagccacacccccgaagcgagtctatgcgcttgtaaatactacgagtgatcctttgacacagctcgcgaccacctattccccggacgagatcgcgtttctcaagcgcttgctggacttcatgtttgcgaaaaataatacacgactgtgtgaaggcatggtagcttcacagatgcaagctgtttcactccataaggctccgtctggcgaacggcaatccacgagcaacgactcggcgcagtcgcaaaccgcagcggtacagtcactgcgtatgacccaagcagaaaccctggtcattcacttgattgaagagggctggctgcagaagagcgcgaagggatatcttagcctcacgccacgagcactgatggagttgcggggctggttggtcttaacgtataatgacgagagtttcgatggccgagctgtggagaggatcaaattttgtgctgcttgcaaagacattatcaccgtagtaagtatacttaccgctctttggtatgaaaaagatctgactgagatactccagggtcaacgctgtgaagaccgtgactgcaagggtcgactccatgaccattgcatgcgcaacttcttccggatgcaacaagcagagaaatgtcccttatgcaaagcggactggcctggcgataacttcgtgggcgaacgagcgatcacgaacccgaagcaacgcaacaccgttccacaacagaggaggtcttcgtctgctgcgtctagtgccgttggcgaaggtttggatgatgaggaggacgaagaataagagaattgaacctctgctggctggtgaaaaataccggttatgggtcttgcctctgcttgaccaagcgtcagttacgaaatgggttcaccgtggacacgcccatgtgaatagcaacgaatgaatgaacgacatggaagattatcgagcgaggattgctgttagttagtttgaggtgacatccaaagcgatgttctatgtcatgtctcgactgcattcttgggatttttgataaggctcaacctttctattttgttttaagatgtaactagatattggggattatgtacatgggaaggatgggccttgtaagatacaagcgggtacatacatgatcttggatgacctatgaaatgaagtcgaatacttgaagctattgaaatgcatcttactggctggcatatcttagacatcacgcgataggtgtctgaatatgggcatgcaaatatggtacagtggaaaaaccggcgtggtcgtggtaagttaggggaaaatacataaatgtggtacgacaaggtaaggtacggtaaaataaatctcaagccatcgattttctcttggcagaagcccaaggccttggattcccagtcctgtctcactccgtactccgtgctctgaacattcatcctttatctcttcaagggtttcaacctggtctttcaacaattgatgtgctgtataatccgctaccttccggcgttttgccgaacactttactaatatggaacccccaacttccccacaaacccaccaaaaccctcgagtcgcgctagacttcccctgcagtcgatgacgaggtcaccccatctcaagccgatttcggtcttcacagccaatagcccgattttatgtacacaatatcatcatattggtcgttgcttcccgcattttccgattctcccgtggcaagccgtcccacatacaagccaccactgatgactcgtacgccatttccccagaaccttgatgccaatcctcactagaaggagtagtataaccgacttggaactgagaacatccactctctgaccctggaacgggccagtaggcttttgactttacttccccacatttcaccatgcgttcatagctggagcgattttaaattgctactacatcggtatagggacgtgcctggatcatctcatgtcatgctgatttaggaaagcgccattaatctccatctttccctaaaaactcctcttgcttcctccatcatcctcacttatgaatagtgctgaccgcttcttcctattcaactcgatatcgacttattcgagcatctgacctggttgacaaagcggtgaaactgcaatatgcggtttaaagtgagtttgtactcctatgtccttgctgatcatctaacactctgcttagtccttcacatgcgcggcattgcccctatttctgaatcttgttagcggctctcccgacagtcgtatcaaaaggtgctttagggaacacacaagctctagctcggccaacttcagcaacaatgtttaccagaccggcttcgatggtgtgatctgggacgaagacaactggcttctgagctcaaccaacttggaacagggtcgttttcaatctcgaggatccgtggcgaacggatatctgggtattaatgttgccagtgctggtcctttctttgagattgatagtcccgatgacaccaacggctggccacttttctctagacgccagaccttcgcaacggtcagtgggttctttgactcacagcctaccaccaacggcagcaacttcccctggttgtcccagtatggagacgatagtgtgatcagtggtgttccccactgggccggaatcatcttggatctcggcaatgatacatatttggatgcaaaagtcgacaataagagcatttccaatttccgaaccacatacgacttcaaagcaggcatcttggtctggtcctacaaatggacgcctcggggcaacaggggatcgtaccagattacctatcgtcttctcgcccacaagctgtatgtcaatcaggctgtggtcgaaatggagattatcccgaccaaggaatcgaatgcgaccattgtcaatgtcattgatggagcttctgcagtgcgcagcgacttcgtagagaccggggaagacaatggtgcaatcttctcagcagtacggccgaatgggattgctaatgtcacagcttatatctacgcgaacctcactgggtcgcccaatgtggatctctcttcgcgcaagattgtgcccagcaagccatatgtccattccaacaaatcgtccattgcgcaatccgtagatgtgaagttcaagcctgggcaattagttcgtgtcatcaagtatgtcggaggtgcttctacggatgcctttgttgatccgaaacaaacagccaagaaggctgcctccgctgctatgagcaatggctacgcccggtctcttcgaactcatctcatggaatgggaaaacgttatgccccaagattcggttgaccactacgcatttcccaatggcacattgcctgcagatagccacatcattgatttggcagtaatctccgtggctaacacttactacttgctgcagaatactgctggcaagaatgcagtcaaggaagccgcgggagcaccgataaatgtggacagtatttcagttggtggcttgacctcggactcctatggaggccaagtcttctgggatgcggatgtatggatgcagcctggtcttgttgtttctcacccagaagcgtccgagcggttcaccaatttccgtgtggcaaagtatgcccaagcacgggagaatatccagactagcttttctggctcccagaaccagacaaatttcagtccgtcagctgcaatcttcccttggactagtggccgatttggcaactgcacggctactggcgcctgctgggactacgaatatcatctgaacggagacatcggaatctccttgattaaccaatgggttgcaagtggtaatacaaagttattcaaagaggaacatttcccaatctacgattcggcggctacgctctatgcggacttgctggttcgaaacgggtcttattggacattgaccaacatgactgaccctgtaagtctggcgcccatctctttacagcacccaaaactaatataaagtaggatgagtatgccaaccacgttgatgcgggtggtttcacaatgccactcattgccgagaccctccgacatgccaacgccttccgtcagcaattcggacttgaagaaaatgctacctgggatcaaatggctgacaatgtcttggtgcttcgtgaaaacgaggtgactctcgaattcactaccatgaatggaagcgctgtggttaaacaagctgacgtggttatggtcacctatcccctgggctatactgccaattacaccagccaaaattcgctgaatgatctggactatgtaagtattttgattcccggaaagagagccaaactaacaagatctagtacgcagcgaaacaatctgctgatggtcctgccatgacctgggctatcttttctgtcgtcgcaaacggaatgtcgctatctggctgctcatcatacgcatatgcgcagtactcatacaagccttatacccgtgcgccattcttccaaatgtcggagcagatggtggataacgctaccatcaatggaggcacgcacccggcgtatccattcctgactggccacggtggttccaatcaggtcgctatctttggttatcttggattgcggctggtaccagatgacattcttcacgtggatccaaatttgcccccccagattccatacctgaagtatcgtaccttctactggcgcggctggcccttctcggcgtggtcaaattacacacacacgaccatcagccattccacagaggctgccccactggagactgccgatcagcgattcgccaacaaaacaatcacgattcactctggccaagaagtcgataccaccatttaccatcttcctctcaagggctctgttgtcattcctaaccgacagactggatcggagaacaccgtaaaaggtaatctcgtgcagtgccaggctgtttcctcttcggatgcattcgaacctggccaattccctatttccgcggtagacggtgcagcctcgacaaaatggcagccctcactggcagctgagctaagctccgtgacagtctccttcgaagatgaggctggcgctatggtattcggtttctacttcgattgggcgcagacacccccggttaatgccactattatcttccacaataagaccctggaagatcctgcggcggcgctttccactcaaagctcggactacacaattgtgcaccgcctgataaacatcgttcaatcgaacccatacgatcctgataccacaaacctcgatagggttgccatccctaccggaaacacaaccaatgtgactttatcatctcccataccagcagcacgctatgcgtctcttcttattgtgggaaaccaagcccttgactctgttgatgtggaggctaagaatgggactggtgcgactgttgccgagtgggctattctcgggcaagcaaacgcaagcactgcctcagcctccaaatctgcaaataagaagatgaaagtgcgtgtagcaggaaccttggtagatacggatgcctttatgcgtcggcgtcagtttttattctaaatttagatgattgacttgccttagagttaccactctcttgtaaatacaatacagtcttcatttgatttaattctctaccaatacacttatcgagtggaaactcacgaatgaagtgtgctccaagtaatgttcgagttgtaaattgtgacaattgaacagaatcgcacctatttaaattgatatatccatacatacagtcataaccaacatcccctactcatcaagcgcgaaccgatccaagaacttgaaggtccgaagtccctcctttatatctttgacaaaggcactcccagcattgctagcagtgtacacaccatcgcggtccgtagaaatgagtgcagagcgtagcgcagccgagcccttaccgagcgcaccaaccgtcttcccgaaccggaaagcatcgagcagaatatccaaaggccgaccagcgggatacaaagacgacgcaccagaagccttattcggcacgctagtaatcgacttggaggcaaacaggccctccgcaccatccgcgacaacaacagcatcgaactgcactgcgtccgacgcagaatacgtctgattaacaccatccgcaaacctctccgcaacaaccacgacatcaacgcccacagcagaaagcgcagactgcagcttcgcgccctgcgcaatagacgccggcttatcgacagacgcaaggagtccaactttcagcccatctagtttggcgagtttctgtccgaaggcgccgatatgcgcggtcgtgttgtcgtggtaaaaggttggatctggcttcggcgcatcaatgccaatggcctttgcgacgcgcgtcgcgaggtcgttgctgatgcggtttagctggatgatgacgttgttgcgcacgacgctgctcttgacgttggatgtctcgaatcggatcgcgtctacaatgaattgcttctcggcgggtacgagcgagttccagaataggcgtggctgggaccagacgtcttcaaaggtagagctgacggtgcgttggagcttgccgcttgatgtgcggtcgggtgcggtgaagaagccgttgcctacggtttgattggcttgttttggggagccgttgttttctgtgttgggggagtaggcgtttgggtttagggggatgaacatttggcctggggtttgttagaaagagggattggaggatggggtgggtttggtggtgggacgtacctgctccgtcgcggttgttgttgtggattggtacacggggccggttgatgggcagctgctcgaagttggggccgccgtgacggttgagttgggtgtctaggtaggagaagatacggccttggaggagggggtcctcggtgaaatcgacgccgcggacgatatggcccggttggaactaagaaattagtattgtaagtggtgatggtgggttgggacgtaccatgacttgctcagtttcagcaaagtagttcagggggtttcggttcagttgcatcttgcctagcttggtgacaggaacgagttcctctgggacaatcttggtaggatccaaaagatcaaacccaaaccgaagctggtcgtcttcctccatgatttgaacaccaagctagcaaaaaattagcaagaattgcgatggatatggggttatcacctacctcccactcggggaaacgtccagcttcgatagcttcgaagagatcctgacgcataaagtccgcatttttaccagcggtctgctgtgcttcctcccacacgaaactagccttgccctgtagtcccttccagtggaacttgacaagcttagtctttccatcgtcagtcactagacggaaggtgtgcacaccgaaaccatcaacatgacggaaagaccgaggaataccgtggccagccattgcccaaagaagggtgtgaagtgcactaggctgctgactgaagaagtcccaagccgagtcgtgcgcggtagcagcctgagggatctcgctatcgccacggggcttgacggcgtgaatgagatcggggaacaagatagcatcctggatgaagaaaacggggatgttatttccaacaatatctagatccaaatcagttgtgtactttcgtcaaaaaaagatctgccgtaccgaagttcccttcatcagtatagaagcgagtcgcaaagccgtggacatctcgcgcagtatcggcgcttccgcgactgccagcaacagtagagaagcgcgtgaacatcggggtttgtttgcctttggcagaaaggaaagacgcggctgtcaggttggaccagtcgccgtacgaggtgaatgttccgtgggcgccggcgcctcgagcatgaacggcgcgttccggtaccttgaaaaacagatatgagcgttggaacttcgattaaaaacgtggaacacatacccgttcatggtcgaagcgttggatcttctggcggaaaatgaaatcctcaagcagggtggctccacgctctcctgcgctgagactgttttggtcctcgatcgggccgccaacatcggaggtcagaaagacatcttggtccttgaggtagaattgggagagaaattcctcggtggaagaagcatctccatcacctcgtctctcgagggggccagcttcgccagtcatataaggacaggcagcattggcaatgccaacaagacccgtaacgagggcaagcacacgcattgcggcaggtaagtaatataactgttaatagaaggccagtctcaatagagttgtcaacaattcaaacttcaggtgaaaggtgaaagactcggggctcgctttatactccgggttgaatgtgaaccccaaacaaaacagcccagtgcgacttttgcaatgggccaatgggaagctccatgaaaatgctatgacgcagatttcaggtactattattgatcagacctgggctggccaattctccaaccaggaacccgttgattattccagcgcaacggccggccgagactaacagtgtgatgagatcgaatcacctgttggatatagtggggcacggctagaggtgttgaccgtctccacgagccaaggagaagatgagagacactatgcatgcattgctccgaatggtagctccaatggaaatgctggggtgttgatccatatgcgggccataggaatcagcatcaggttatcatggcgccactagaaggaaatggcaaaatggcaaaagatttaagctgactattgaaaatctcggcgactctttgaatcggaatagccggataagcgtcaagtcaaccgttgcatacaacatagcgaagggggtgaaggggtgaagtcttggcggttgattaagcgtaggggcacgttggtcgaggccgcgatgcttggtaattggcgagtgacatctgggcatccttgcaagaccacttagcgtccgtttaaatttgaaaacgagacggattatgtaggggatctgcaccctagcgtcaggaaattatgtctcatgttggatttatctcccaattgcaacgctgatatctaggtaaacaaacactcgcattgcaacatcgccattgcagtctagcactcgaaattgggacctgaaaatctacagggattaagctgcagtgctcattaccaagaccagctcctgcagctgatccctgtcaacgcacatctcttaccacttttagaactcatccgcaacgcagttgggatcgtctgtgatgacccgtttgtgttagtgatgttgcatcggcctccgcggaggcacaacatggggaatagttaattttagatcttcggggtcttgttctgcatcaaatgacatgcccatgtgctgttcgtggctgcttattgttgggttcgcgtggtgtgagatgcttggcggggaaagaaataatctagccagccttggaaggtgatgacactggtccttgacgatcttggcaactgtgaacttggcataattagttgtcgctaaagggctatttttaatgtgatatgtgtgtgatagagctttcggccggggagtacggggtatttttgtgagaggggttgagatgtctttttttggattgagaactgtctttggatctagtagaataatacggatatgctatagttagatagaactgttgaatggacagaatcaggtatagtctagacacaaaagaagacaaagatttatgatcgaatgactacggagtattctttctataattcaaacagccacatctccaccacgaagtacggagtatcccgtctatcataccaccaagtactccgtatagtagtatactcagccgatgacacaacaaatctatcctcgagccatcgcaaccacctcaccgggactagcggggtcactgcgatccacaaacccatgtttcgcatacagcggaacaccagccttactagcatcgatgtacgccgccacgccttcccgatccgcaatctcacagccccatagaaccagcatagcgccagccccgcgacgacggtagtcgggatgcgtaccgagcatatcaaggtctatgttttactagcgtcaacaaacagtcccccagcagaacaaaacaagcggctaagtagctagctctcgagtgatccaactcacagtaatgcttccgatcacccatcacccgcctgcgctcgctctccagccccccaaagaaagtatcgcaaacctgcccaggcatgtccccgtgccaaggcgggaaccgatccccgcgctcgtcgggcatggccaggtcccatttcgcatatgcgactatccgcgccttcccttgcgtgtcagtagtgctggggtcgatgatcttgatgtatttttggaacggctttgtgagcatgtcggtgcggttggcttcagtgaaccattcgcgtgtccctggtgtgtcggggaatagacggcgcatgcccgggtcgttgaacgcggtgaaccataggtctgtaatggccgggaggtcttcgactgtcgcgggttctaggactagagggtttggggtagacattttgggctttttgtttgcgagttggttgttgggacttgtcgcggggtagttttaggtcgactgcaggctagcggtcaatgctacgttgatttggaatagtcgggctagtattagttgattattatttgaagtctgagtcagacatatattaaagagatacataactagactagaacggaatccttgctcattggtctcttttatgtatatgcaggtctaatttttgagtacatcaaataaaagaggcagcccagggtcacccaggtatagttggttccaatggcataaaagagttcccttctcatgtagaaagacgaggtagttggaaagactctccgtgctctctcatatatcgcagtttcgtttcgaatcagtttggcgggagtcgtgcgaccgaccaacacgacttagatttgaaagatgagacgttgagcagataggattattcaaggaccattcgggcatgtttcataaactgatatccacttcccaaatggcgtttttcgtcaacgggtggcttgggattggatttccgggagacgaaggggatatagtaaattttgatttcagtttcatgggtttatctacaattcatatttacattgaatgaataataacaagaagattgagggatagacgtaagaatcgcccagcctaggttcaaacagaccgtctatagagggtgcccttaagccaaagtctcaagtgagcggtaaaagatatgcgccgacactatatcgaatgttagcaattgcatctccacgagttataaagtgcacatacgaaatagcggcaaagcaggcacacaagatagcaccctccaaataattagtctttcccttgagcacgatgaaatcgaccagaataacagccccgatcagagtgaccatctcgaacttgtcaaaatgcaaggtcatgggcttgtcgagagcccagccaataagcaccatagccggcgaaaccaagagaccgatttgaatggccgatcccagagcaacactgatggcaaggtccatttggtttttcgaggccacaacaacggcagtaacattttcggcaacattcccggcgataggaataatgatcaaaccgacgaatgattcaccgaggacgccctgttcgttgagcgttgagaagcttgaggagaagtattcggcgcatatggcgatgagaacggttgatagggcgaggagggtgacggatatcgttcggttggacttgatcacgtagcggtcgcagcgacatggtccatagtctcggataggtgccgtttgtctggggaggctccttccttcagatgccgtgtgtcggtggagggtcgttcttccttcagatggttcgttgtggaacagtggcatggccgctgccgtttgtgcgtcgactgagcatgaccgtgatcgcacctcttgcatctctagctggcggatatgtctgcttgttgcgctttcgaccgtggtgggacgcgattcgaggtcgtctgtatatagaggatcgattggatgcggcatttggagccgcgtggagtggaacaagtgagcgtgtgatttgaactggaagaaaaggtataagaaatatgtgaggagaagaatgatggacactcccctgctgaaggataatgacatatgatcagcagaagtgacgctcttgacgctgccatagaaagcggtctatgttcaggattagtattggaagcaatggggatacttggaacatcgccttacgggaatcataaggcaagagatggtgagattgagaagtcccacaaatgactgggtgagatcggtgttatacgtcacatcacttgtcgaaatacagcctgctataattgcagatccgaggacgagcagaaggttcacaaggatggagccgaggagtgatgattgaactactttaatgttgtttttcaacaaagcagtgctataaagattagttttggctccgccgacttatcatatgaaacttacacactatatgatagtcagtatatatagtttgaaaataagtgagttccacattgagactcacaaaataataagctccgctagattccctatcgtgatgttgaggagagcgccagcggtctcacccaaatccttggatatcctctcggtggcttctgtgagtgtgatcgacagcggcacaatcgcaaggaggttccatatgaatatcacaagcgccgggcttttggtattagagagaatgattgccgatgcggcgaaggcaccggagaagacgatcctcggcctgagaatctgttttgtctgttgtttgaatatggagaaggaattgcagggtctgccatgatggggccacccagacaacgtgtcgtcattggggatctgtgttttgtgtcgaagaaagctttttactttatggaagatgtcgtcggagattgaattcgtggaggcctcggctggtccttgataacgataagaagtccatgtcagcttggacgacgccggcaattggaggatagtgcggactcactgttcatttcatattgacaaggataggagccactagaccggggctcagattcgaaggaagtattcagggcgtgctcgtcacttgagctttcagcgaaggtattgatgtcatgaaggttcttatcgttggaaccattcactgtggtcatcatggaagagccccgaaaaagaaaggattaaaaccgatatataaatgccaaaatggagggcggaatggccatctgaatgtgaaaacgagagattgaaaatgagcgtgatatatggattggtccgggaattgattatcggcgagatgatcgcggcacaacccctttttccttgtggcacactggtcttaaccacttgcgagttagcgtcgcttggctccaatataattcgttctgattcctccttatgcagcgcacagtggattgtgtggggggttgtataccgcctacctaccgcctaccatagatgcactgcagaatacagaagaatggtctatctcatgattattggccagtgaaaggtatgtatagaaaggttgataaatcataccgtccgaatccgtcccctttccaatattgaccacgaattgatagcagacatgctattttaagaccggcagtaccggcagaatccacgagtgtcagacccctgcgagaagccccactggacgatgatcagtcacgtgagagggggctaaaggtgccaggccaaccaaaaaggggaagacaaagctgttatggcgacagaaagtgtgtggagaaaataaggctgggagatacttggtgatcggtttctagtgggcgtgggatgcaataatccccgcagagattgacgtagcgcgctgataaccttccaaggtgggaatagtagacccatacgaggcgttacgattacgagtggaaaaggggctcagccttccaaggctgtccttgggtcatgtatgatgatatataactggtcatcggaaacaccgtcaagagggatggtccgtttggttccgcatatcttcttaacatgggtgcttttcccaaagccagcagcagcagaagagataataattttgccaagcaattaaaacactgcccgcgtgttggtgggcttggcatttaatcaggattttgttgatatatcatttttcacttagggctcaagggacctactaactatggtatagtgtatctactgaccatgagaatgcaattggtacatatccatggatgtgttctaatcaatctttgatttgttcctgaacacccaccaaggctctcctttcaacgattaatctttagcgagggaaacatcgatgtatcatgttgcaagtttagctatctaggctaagcacggtaacaaagcgaacactcaattcattccagcgaagatataagcgtggaagatatcagcactgtacgcggtcatgggatgtatcgaaacatcaaaatcaggttggaataacctccgatctgtatcctgcaattcgaatgcgcgttcgcgatggcagcaagcacactcaacagtacaatgcccccatcctttcatccgatcggaatctgggggacgttcgcagcatttgcattgtctgccactgcaaccgcctcgtttagcacaatcctgacgtagccatttacttcgcagatgccacccggctttttctcgtgaagatagatatgcatctttggcgaatcctggtctgcctccagactcggcgacatacatatttctttcaaggcgccaatattctttgtctagacggaccagttcgtcggtcaacttgtgtagctgcttttagtcgtctgccattgatttaacctgaactttttggatatcttccttcaagaatgactcgcgctgggtagttgcgcatagctgcatttccgtttcgatggcagattgcgcccaaccatacgctttatcgacgtgccaattcaagttgtgacaccgtcgacgaatcttttgagaaagtctccacacaccagatctccctattggcttttccacatggaaagccaacttctgagcttgctcgggggacatcatcgtgccttatcatattttcgagaagaccaataagacctacagcagttattaggtaggtcagacatttacatcatgcatcatcatagacctcgataccaagcccatcttaggaactaatctggggagaaccctgaatttaagtgcagtcgggaaacctacctgatctagtccgtattgtcttttatatcgccgtaactggtgattcggtcaattttgcgcctggcccatgctccatcggattcgcatccacttaacatgtggacttttaagtggatccccgttttatatttgagaatcgaatgctctcgctcgtggggtagattccgaccggtaaacccagtcgctcaacgcggtcccactaggtctcgctatgtttggaggggcgattcatttgccaatgtagaaagccttagcggagcaaagttatagtcaactggtgggtgaagaaagaagaaagagaaatatagaattggatttacttcaagtaggcacgccagtgcaccatatccgattgtctactagggtatagctatagacacaagaatgtagtcggtcacttaggctcgtctttgtagtcttttagtatttttatcttttcagacgtctctttagatatcttctctattttgattccctggactcactgttcgcaggcgcttatctatatatggctcttttcgttgcctttgtctaatacttgggagatacttacgctgcgagttcccgcatctgtccaaccaaatcgaccacagtctccttaaagggccgatatttcacccccaactcccgagctgcagtctccgcatcaaacccataagaggcactcgacttctcacccgtcttgtaattcgtagtcacaacatccttcgcccactcgaactcatcgcgaatgatatccgcagcatattcatacgagaacgtctccggcgaagcagccacaaaccgcttcccaccagcttcgggcgtaagcaaagcctgaacatgcacctcagcgagatcgcgaacatcaatccaaccgggccgcgtttcaggaagtggatctgcaccagcggccacactccagagcaccatatttgattcgttgagctgctgcaccgtcgacacggggtgcacgactggaccgaaaaccatgggaggacagagcgtcaccaggtcgaactttgttttttggtccttgacaaactcccacgctgcgagctcggcgaacttcttcgacccacggtatgcagttacagcagtggatttcggatcgatggcctcctcgtaagtcagagggttccagttcacggctgtatatgtgaatcctggtgcgggagtgctgctcgggttgatcactgcggagacggaggatgtcaagacaaggcgctggacttttgatcctggcttggcggaggccgaaagaatcgacttgactccgttgatagcgggtaggattaattcctgctcgttgttggtggtgtcgtagaataagggctgtggaacttattagttctttgtattgatcagaagcagaattattgcgagttgcctacgcttgctacatggatgaccgcgtcgatatcatccattacagaatcgaagaccccaacctgggtgaagtcttccacgacgacgaaatcaagctttgaagcgtactgcggacgtgcagctttcatctgatcccccttttgcttggatcttgtcgagcctcggactgagaatccgcgagccagtagattgtcgacaacatgggcgccgatgaaccctgtggcgccagtgacgaggatgtatctgtgatcatgagcactgatcagtagttaggaacagaccgacatacgagggcttttgagaagacattcttataggatgtaggtgtagttaaaggtaaaatgaatatcgacaagtgtcttctgggaatgactttactgtagtatgcagtgcaccccgcgtggggggaaataagatctcaagatcgatatccacagcaattccacattgctgttagtgtgggggggaaccagataaggctggaaatatagtctaggctgaacagagaagcgtattttgttgttctaattcgttggttatatggtctagatatgcgtctataggggacatcatctatatctactacatcatcacttccaactctccttcagcacctcctccgttgtacggacgataatatcataggcattacggacatacctctgttcagccagagcgtttccactaatcacccgtataacacagacgccatcaacgactgtagaggtgatgaagattttaccttccgcgttgaccaactcggagactttcttggtcagattgtcagcaacttcatctttggccacgcgaccaggcgattcactagccccgctaggattcttgacacggaagacagtcaagccaaaggctggcttcgtgacaatctcaaatatatcagaccgaccgcgcacccagccagcaaaaaggtcaccaaacccgatggtcttgcggatgtgcgatttcatgccgttgagaccatagctccgaatcacgaaccaaatcttcaatgcgcggaatctgcgaccgagagaaatagaccagttccggtagtcaattacggttcccatatccgagtacgggttgcgcagatatgctggtgtgacatccaaggcgttcgtcagatccaagcgattccggacaaagaggacgctaggaatgttagaccaaaagtgcaaatttacccacagacacttggaggaaaagcttacctagcatcaaagttgactagcagccacttgtgcatgttcgtgttgaagctgtcaacaccctccgcaaagtccttcgcaatgtacttccactcatccgcaacgagcgccgcaccggcataggcggcatcaatatgcacccagatacgctgccacgccggcttttcttgtagaactgccttgatctctgcaaagtggtccacactgcaggtatttgttgtgccaagggtcatagtgaggtggtacgggacaagtccgtccttatcacacttctcaagaagctcacggagacgaggtccagtcatttccatgttatcctccagccgcgtggacacgctgcggaagcgagtgcccgcaatcaaagcacccttagcagcgctgctgtgggtttgatcactggcaatggcgaccagcttagcttggacatcgaatttacggtcctcgtactctggtgtaccctccttcaggccctctgcaagaacaagctctcgcacacgtctctcccgtgcggcaacaataatagtcgcaatagcatcactcgcactgttttggatcacaccgccgccgtgggtctccgatgtacttctaaaacactggggtagtgccagagctttcgcgacccaatccatgacaattgtctccatctccgtacatgctggcgagcacaaccagttgaacgcaggggcggtgaatgtggcggagtacatttcacccagaatgctggggtatgtcacgcaggcggggaagtatgccatgaaattgggagactgccaatgggtcaatccgggtttgatctttgtatcaacatctttctggatttgtgcccagtcctctggctcgtccggagggttctctgggatcagagggcgaagatatcccggctcgacggcgggcaggactcggagctcaggtacgctgtcgaagtatttgatgactgcacaaaagctcggttagatttaacattatcgagcccgaaggttgcacaaagttaggacggctcgtactatcatcaatggcagagtgtgctgcggccttgaactgatcatgatccatgctgcacgtcaactagatctgcgacgcggggtatctagagctcaaaatgcggcaattggcggcacagtagaacacagtacggggagaaagatatagaatgaaagtacaagtagaatatgtgatattgaggccacagcgaatgttccaaggcaaatgtgggaaaagcaaacatggaagaaaaggcgcggggaggcctggaattaattccgtcggaagtttccttccgtgttccgagagctcggaatattccgcctttccaaggagtatatatgccataattccaaatccactctcatagctcaatcttcctcttccttgggatcataaatgtcgcccgcaggtgtcttctctagcctctttccatcctcagtcacaatctccttgctagggataaccaccacaaaaacccgagcaacatccttgcctcgatttacccattcgtggtttgcaccgcggcagacaatgacatcgtgttgatttaggatcttctcttcgcctccgtctgtgataaatccgacggtacctgacagcaccacagcgtaatccaagctcagtgtccgatggaaccagcctgcgtctgccgggggtagatcaaggacgcgacaggaaggacccttggtgtcagccagtgggacgagggttttatgcggatcagagagctcgcgcatattgtccactggaaagccgcgcgaccggtgaatttggataaccccgaacccagagtcaggccccggggttgagaatgccggagcagatgtgggatcgtatggcgtcagaatttcgtcggaagcgaaataggcctttccctgagcatcgtggcctgcgataatgcgacggattggggcgtccatggtaagagaaagaaatctctgggatgagtaatgggcaagagggattgggatagtctttgaagcgggaggcgaatatggcagttgaaaaagaaagcaagtgtcagtgggcttatataccttatggactgagtaaatagctgattaattaatggaatacagatgaacattaccaagcacttccacgatgttgatcgtcattcataggtttggtatgcgctgcttcgatttataatcatgggattgataagatgggggccgaaaatatatgaggctgcaaggagagagcctccagttcgactgctggcagaagaatctgaatctaggtagcgtgcatagtgtttcgagaaaaaaaaattcgctgttgtttacctgggctcatgtggagtttccctgatcgccttcctcgtcgtccggtttgtcaaatccttcatcatatacctcctctttcagctccttcccttggacactcaacttctccattggtagatacacaaataacatgcgacaccatttggtatcactccggtttcggaatgaatgtgcagtacccctttggatgctcacatcgccacgatgcaaatgtcgactcgaacctgagtccagtatgagatcaacatccccctcaattatcacaccatagtcgacgctcactgtccgatgcatcggcgttgcctttcccggacggaggtcaatcagacggaaaacagttccgttatcgactgtgactccaggaggttgatgtaagaactcgtcgtacatggcgatgtccgcctcagcgtcaaccgaggctggcatgctggtagtagcgtacagcaaagcaatctcgccatcttccccagttggtgtcgacgggaggtagtcggggacttgcgcatgggaaagaaatattgattcgccgtcgttactgtgggtggtgatgtagcggcggatatagggaagcgggtttttctcgtaaggggacataatgagctgatagagatggtatctgaggaagaaaaaagtgatatcaggtcagcgactcatcaaaagtcgcgagccttaagttggaaatatacccttgacgaaatgctgtcacatcatggtggcatcattttataaatcaatgcccaagtaggcttaagcataattctgttccaaggttgagcaaaaatcaatctaaagtctgcttattccctcgagcactttcttgacaattattcttaattcactatcttattaatataggagattgatgttatattgccccccccccnnnnnnnnnnnnnnnnnnnnnnnnnnnnnnnnnnnnnnnnnnnnnnnnnnnnnnnnnnnnnnnnnnnnnnnnnnnnnnnnnnnnnnnnnnnnnnnnnnnnnnnnnnnnnnnnnnnnnnnnnnnnnnnnnnnnnnnnnnnnnnnnnnnnnnnnnnnnnnnnnnnnnnnnnnnnnnnnnnnnnnnnnnnnnnnnnnnnnnnnnnnnnnnnnnnnnnnnnnnnnnnnnnnnnnnnnnnnnnnnnnnnnnnnnnnnnnnnnnnnnnnnnnnnnnnnnnnnnnnnnnnnnnnnnnnnnnnnnnnnnnnnnnnnnnnnnnnnnnnnnnnnnnnnnnnnnnnccccccccacctgcctgattatgccttattctgcttgattcctttcgcaatctcctagttatatataagacaatgctttcatttaaccccatcttcggtaaaggtcgcaaaggtctgctagttctgtatacatgaggagtctcatttatagcacgcgaccatgcatcaataattaaatgtaagaaagcctggatctgaaggttatattctgttaaaacatgccctgtagtaaaagatatgatcatttccactaagcaccgaattatgccttgttgacaagcacacgtaacatcttcattaagcagatttatcgttatcgtcatcatcatcatccttctcattcaaactccaccgtaaaaggatcggtcgattcttcagcaaagcacaaataatattcacgttgctcttccgagttctcttcccatgggatgaggagcttcctaaggcctgcgtgcactagcttttgaaaatcttcggggtccatatacgtccttatcaaaatcacttgatagtagctgaccggcaggagctcggcgcaggcgtcagaaatttgctggccagcctcctcaagcttttcagcccagaagattgcgtcctcaagatcagattgtcgcttgctggtcccgttttcgtcttcctgccgaagatatgaacacctcactttggctgctagcgcataatccggctttaggaaacggatgccctggatggattcaaaggcctcggcttgcttaacctcgtcatatgagaacgtttcgacaacggtggtcagaatatcaattggaaccgattcatgatgtaactttccctccaccaacttgaagccgccgaaatttttgagatcgtgtaggattgctggatcgcggatcagaatgtcgacatcttgtgtgactcggtcgtggccttgcatgttggcggcagcgccgcctacgagaataaagcttgtgggaatgacatcacgcaaagcgttgacgcacgcagtaatattcgctgagtcggtggccatagcaactgaatattgattagcagaggttcaagtagagaaatcacgctccacagggccaaacctgatatggcgaagaaacggtgttgcgataagaggacagaagaggatgttacgcgccgggtctttatgaaaaagagtgcattctaagtagagtattgaaaatgaggggggaaggaaaggaaaggaataggaatcaggactattgtgggcttttgtacctttgcaaaccagggaaatctcgtatgctcacttacggtttaggaaggaatgacttccaccaagaaggaaggaaccaacgagcctagatcgtaacagagggaagaagaagaggacagaagaagagggcagaagaagaagagggagaagaagaagagggagaagaggaaatgcggggtgaatacgagtgacctcgacggcctaaggcctccagataatcgttgcagagcaaagcgactgattccaacttctaatgctacgcaaagcccctctcttactggcttattctccccctgcctgtaatctcaatactgcttttacaattgggcatattccctgccatatggtagtatgtagtaaggcagtaggtacctttaatttgtatgcaaactactaataaaattaagtcccttttatcatatcaatattattaactgcttcatcaactgctttatcgttaactactttagcgactacttaagcaactgcttgaacaaccgctagcacaaccacttgagaaactgcttgagaaactgctttattagttagttagttagttagtacggtgtagttaactaacttctttaactacaacatagtaactattgcagtggggtttccagggcaggatgactaagcggctatgtgacataaaagcactcccgaggcataactagatagcaacgcagacacctttccacttccattctcagtagtcaccccatggtattctcctctctagcaccctaccactcccagtgatgactctgctctcacacctcttccgcaggcagggctgtcggtgcccctatcctagggatccctcttcactatgtagcacggaataaagtatcgtctagccagattaggcctagtctatatttattctgccggtcggattattctgccaaagttagccgatgggatttcaccgcattaattccataggataaaacaacagtcacgtgatatgcacacgaggttacgatttaactgcttcgcttcgctccgatatatgccacataaaatattcaacgccaaagtaggtgattgcataaggaggaactggcaacccgtggactaagcccaaccctattccaggattggagtcggcaatcacgtcatccgacatgtaacggtcacatgaccgaagtgcacctgtagattagttgagatactctcagtccatcggttagcatcaatccaactgtatttgctgcatccttcctgcctcctccgctggcaaaccccaacgagctcaaaagctctccacaatccggtttccaatatattccgcacccgatatgacaaatggctgattacgtcgccgatcgacctcttcaagaaacctcctcatggcccctttatcacgtatcggaatctctcgaggagcacggaatcagacactgtatcaccggcgatgctattattgggattctcggctatcccttagtcatttgcgaattttatcttgcggttgcagacgagcaacttgaagatgcccgctctgtcgttcttcagcaaggattccaagcatccccagtccgcgatatatatgtggataaggatgctagggtttcccctctaggctggccaggatacagactagtgatgccttgcgcatccgtcttcccgggggttatgcttgttcccgcgagcttctggcatatggatctctcagaatcgagtctatcgacgaacacattcctacatgattctacacgatgccgatttccaaagcggctattttatttggatggtaagcatcatagcatgattgcctctttcaactttgtcttggcttcagtctttgtttgtcctgttcgtgtactgatcttctcttaaattcctagctctgatcgatgttattgtcgaaaacgcattgaacccgggcggcaaccaacgcatatcgaggtattttaaaatgcagtatcactatctagtcggctgcatccctccggatattcttctcagtctgccgccggaggacaaattctttgtggacttatatggtaaaccgcttccaccaaaaacccggaaaagagtctccttaaatcggcagcggattcgacagggtctgatgaatgttgaagaagcatggaagtcaatccccaaaaaagctctactgtttgaagagatagagataaaccgtaaagctctgaattcgcggtaatttatgtctcatttcctaatttagggaatttcaatttagcctatatttaattggctgttgttaattcctcttagattaagagaataactagagatgtgggcttctttctatatagcctgattgtccctttgccctttcttagtcttttattgccttatgaatatagcatatctcttaagattgctagcaccgaatcgcccaacatgccttctagtgtcaagggtggtaactaggagcccggtgcgccacagacaccgcgccctactcaggatgacctcacaatcgccagcaggatattaccccagatgacgggacccagtaagtactccttccagatacatttagttcaatgactaatgataacccaagctgcccgccagaggaacccggccaacacaatgttggagccccctgaaaatccctgttgagcaggccgacggtgcagatcttggtcactaatatacgggcaattatagatctacctctcccagcaagtgtattacttgtaaaaatagctaggctgcaagtcagcaatatgaggtgtttatccactgaccatttgctgctagtaacgtggggcggatggaactcagctctcttataagtgaaggttcgtgtactcaatagtatattctttgttctcaccacactttctagacaaaccagtacgcactatgaatccgagcccctaaaagcatttcagaaagcaagaaatctcaaactctgttcaaatcgtgtatgggatcgaccgcgccgagtacggacacggtgccgcgttctatgagcccttcgctattttctacccaaatttgtcgttcaaatgttttgctgcccatccgacaccatctcgcccttcatgctactggcaaatttctcaatgcactcatcaagactaggaccacccccaaaactgtcagagtccctcttagcagcaactgcttccttccagagaccgttcatcctctccccacccaagtgcatcagctaattgacgaacaccgtcgtcgcaactcccgaggatgcacacatcctcgtttcgatcacctagatctcctgctttttcattgttgatcaaaacccgaggaaccccctcttccactttcgttggcagagtagagcaaggtggtacacgtaaactagttcccataacaagcatcaagtccgcctcgcggacctttctctcctcctcctcaaacccagtcaaatattgcccaaagaatacaatatctggctgaaccggaccgttacacctataacaacggggtatttcaccagcgagaatcgctttgtccacgagatcgtcgaaatatggtggcttcttgcacctaatgcaatgttgactcttccagtttccatgagcccagtaaatcttgtgaggaacccctgcatcttcctcaagctcatcgaaattctgagtgataacaagatgaagcagattctttctcgctagcagtgccaggaacacatggctgacagtcggtttgaaatttcccgggtgaagtgcccgggccaatgtgtagaatagctgaggctttgcccagagataccgagcatcaaatatcgcctctttgcaagggagttgcagtggagcgagcttatcataaaggcctgtgtttggagttctgaaatctgggatccctcnnnnnnnnnnnnnnnnnnnnnnnnnnnnnnnnnnnnnnnnnnnnnnnnnnnnnnnnnnnnnnnnnnnnnnnnnnnnnnnnnnnnnnnnnnnnnnnnnnnnnnnnnnnnnnnnnnnnnnnnnnnnnnnnnnnnnnnnnnnnnnnnnnnnnnnnnnnnnnnnnnnnnnnnnnnnnnnnnnnnnnnnnnnnnnnnnnnnnnnnnnnnnnnnnnnnnnnnnnnnnnnnnnnnnnnnnnnnnnnnnnnnnnnnnnnnnnnnnnnnnnnnnnnnnnnnnnnnnnnnnnnnnnnnnnnnnnnnnnnnnnnnnnnnnnnnnnnnnnnnnnnnnnnnnnnnnnnnnnnnnnnnnnnnnnnnnnnnnnnnnnnnnnnnnnnnnnnnnnnnnnnnnnnnnnnnnnnnnnnnnnnnnnnnnnnnnnnnnnnnnnnnnnnnnnnnnnnnnnnnnnnnnnnnnnnnnnnnnnnnnnnnnnnnnnnnnnnnnnnnnnnnnnnnnnnnnnnnnnnnnnnnnnnnnnnnnnnnnnnnnnnnnnnnnnnnnnnnnnnnnnnnnnnnnnnnnnnnnnnnnnnnnnnnnnnnnnnnnnnnnnnnnnnnnnnnnnnnnnnnnnnnnnnnnnnnnnnnnnnnnnnnnnnnnnnnnnnnnntctgggaccccggcgctggtactgataccagcgccaaccaagacgacaatctgtgtggcttttccagtctggataaggtcgacgattgattgaatgtcaggtttcatactggcctctgtatgatgggtggtttcgtcagacatatcttcgagtttggctatttttgtggatgatggttggaagtaaatgagtgttttggttttggagcgtcaaagaagcatcaaagcagatggctttggatggaaaagaaagctatgggttttattgtgttagctggctaggagagagagaagaaggaagatcaaagaaggtagaaatagggagcaggtgctaccaatctagggcagaaacggtctgggcaggtttctatctgcagtaggcttctgtaaatcatacatgtcatgtgttcattatccaatcagcctgatggaagagattatctcttattattcactaggcaaagtaacatttgtcaactcagtgagcaagtctgtccagtctggtgcattgagctcaacattagcgctgctctctagcatctccgtccatatgtcttcgagaggcaacggactaagcaatgcatcttgtgaagggtacattgtcgattgaacgttgggtatttctggagggaatgtgatgctcttggaacccaatgaaacaggcgtggggatatccggctgcgaggcgttggctgttgtgagatttggattcgaagatgcagaaagctcctgtaagtcgcgagagcttactcttctttcgtgtttccaatgcctccgcaagatctccatcatggctttgattccttcacgtgccattggagagtattgttgtgcccgactgagcattcgacaagcgtcgagtacctcctcttttcgtttctctgccagaatatcatcccagttgaaacaaacatctatcagaagaatggcagctgccataaaaacgtggtgcatgactgcccatataatcgagctgtgcggtgtgaacacaggctcttcctcatccataatgcgtttcagttcgagcaccttgcgcgcagactgaagcgatacgatatgcgaataggaatatttggagtcctttgctccacgcacaaagtagtggcgatgcaagcggcagagccgcgaatgatagccctgttgtaccagcgctcgctgccatgcaagagttggtcgttcacgatagaccaccgaaaattcacgttgggatgcttgatcatagcgaaagaagccgggaatctcagcgcgtaccttgtgaagcttttgatctagctcaagtatcttctcgtagggtgcctcttgcccatggaaatggtagtatgacgtttcatccactatttgacgacacacaacagccaacttcaatcgacatagactgtatgacattgcggtcggagtagatagaggaacaccgtgttcgctatggttgatttcctcatcctcaatattgagaggctcatttacaaccatatgcttaggttggatcgagtacgtccactcttggggtccactcaaaaagcctattaaccttcagatatcatcagtcatagtaccggcaaggtctttgttaagaacgtaccagtcgtatgttgccaagtcccaccacagccgtcgtttgagttcaacattcgttttatcaaatccatttgctaagcgttcggtaataacccgaggacagtccacaatatgaagccccatactagtggcttgactcacaaatgacctatgcacaaataacgggctgacggaggagggcaagttcatgttggacagatgatggccaatgatcatagtcgcttgcagtccttcgaggctgggataagggatataattgctctggatcaatgcagcgcctgccaaaaatgtactgtcctgactgaattgttctgcgtgctcggatgactctatcaggagttggtaatacagggcagcagcagtgatactgaacagtagagcagtgtgcgccaagttgatagactcatttcgctcaacacgctcgtaaatcgtctcaatttgtcgttccacgcgactggggatgatgacatgatactggaagtcaaggtatttacaataataccgaaatagactcagcgcttctgccagtggtggcaaatacgactgcagatgaattgtcgccggattctcgcgagaggcgagtcgttcacacatcggaggcaatcgatcaccaggtgtgctgttttgctgggaaggcgagcgttcgggttcccgctgggagatctccgccctcagtgtagcagggactgcactagggatacggtgtcccataacaattgtctcaagccaatcggctgtcaaaaggggctcatttccattgcgactttgtgtctccgtgtcctgtcgtggagtccactgcaaggtccgaggtggctcagatacgcgatcgtccaacatgggcctccgatctgtttggctcatgggtcgcacaggggttgtccccgaggcgtagctgccatagctgcactccagtttacgcgaagaacagctactacagggaagctctctgtcgcacttcagcttcttctttcgacaggactcgcaggaaacggggtcttgtcgagactgtcttttcgggcctggggtgacgactccagaaacttgtcttcgtttcatgttttcaatctccccgaaaacagtttaataatagtgacccagcgaaagcaaagaaacagcgcgtttttcgcataggagacagcttgaagtgttggcccggagactccgcggattctccgagacgctaaaccatatctgtcaattcttcctccggggcatctagacagtagcccggagactccgagagtgattttcagatgtaattaaggagtcagatttcttataaaggtcatggtattccgtagtcatcttgcttttaactagagccatttcatttctgccaaaatgtcaccaaaggatagtcctccaactgaatacacgtaagtgaaatatacttcaagctacaagatatgtagccgaccagtgcactaacctcttctaggccccgagcatggctagttatattaggcgccttcacttgtaccttttgcaccgtggggtttatgaactcgttcggtatcttccaagagtactacacaaaaaaccagctatcctcaacctcgacatctaccatcgcatggatcggagctgtgtcaatattctttttgtttgctatatctgtcgtggcgggagcaatgcttgatatctttggaccaacggtaagcatactcttcctgaatcgtcgagaaataaaactcatacttcctttgaacagttcatggtatatgttggttcattcgggtgtgtttttgcaattatgatgacttcactatgccaggagttctatcaattcctcctcgctcagggtattctgttaggtgtctccatggctatggtgacatggccgatgctcgcactggtcggacaatatataaaagtgaagcgtgctgccgcgatggggattgtgcttgcgggttcatcgctcggcggagttatctggcccgttgcaatcgacagactgatcaataagcccaagattgggtttccctggaccatgcgaatcgtcggatttatcatgattccttgctttatcttctcttgtgcagtcgccaaatctccgaatacgcctgcaatcaatttggagagtcgtgattcaaaccagaaaagtgacgaagataccgcggagcaaaaggataagccgcagagtcacaaggcagaagcgatggccctttttcgaaaaccgtcgctgcagctactgtgcctcgccatgttcattacatactttggcatgttctcgccgtttttctacacgacttcctacgcggttgagaaaggattctcgacatctctggcattctatactgtttccattgtgaatggggcttcattcttcggtcgagtcctccctggcatcgttgccgacaagtacggaaaattcaactgttgcatcatagcaactatatccgcaggggttgttgcattgtgctggactaaagtcacatctgtggccggtctggtaatttggtccgctgcctatggctttgcgtctggagtgagttatcctcgaatggtataaacttcgaatgctgactagatttgtagggcattttatccctccagcaagcttgtgccgcccaggttgctacttctaccactcttggcttggcaattgggactgtgtcgggtgccacagctctatcgtatgacccccatatcttgaaatgataatgtagtatgctgactggaactgcagcgctatggcaaatgtgcccatcagtggtgctctgctcgagaagtacgggtacctttccctgtcaatattttcaggggtatccttgctactaggtggcttgcttttgattgctgcacgtctagtacagaacagagagcttcgagctatcgtgtaatgcttggccattgggttgaatttgaaaaagtgagaggtgaagctgatagaagatgggaagatcgatcaaagtccaaagacgattgatggatactgatagaagaggatttgacggaaaatcgtgcagcatattttccactagactataacaaaaaccaatgttcctgtttaaggcttaaatgagccataactatcacattctgataagatttatcgaaaaacaaaaaacaaaaaagaatggtcccagagggggtcgaaccctcgacatctgcgttattagcacagcgctctaaccaactgagctatggaaccgcttgatgtatgtagcatcaatttgtggttatataaagtgagtaggacgatagagcagggacaaggccacttatagaaagagtacctacagttcgtatgtatgtaaactcttagcagaattaagtcactccttccctatcttgtaccaactgtcacagagatatggcagaattctgagtggtaccaaattagaaaggcggtacaggcagggatgtgcaagtaacaactccctaaatatatattccgtacagataccagaagtatgttccaaaatttgcaagaagttccaatatttcaaataattatgacgctcgggacaatactatcccgaacgatgaaacggaccgacgacctgcgtcaatatactagactaggctaacatctggggtcgaatattcccgtgtatgtacgcatacatagattgtcctacctcctgtaagaaccaagagtctcgccgaggctattggataacggcgatttcgttcacttcctttgtggccaggcatcatacagtccttcaaagaccgtcacatcttcgaatgtcgcttctcccacgccgttatggaagaagttaattttagtcgagttggcgtaccaagaccttcatgcggttagtttttgaccaatcttccataaacaagagagacttaccgagcccaagtgcctagagcaaagcgtccattggcatatacttccagtacactattatccaccacgatagtgagctccaaagtttcaacctgttcttttccatttcgcaacacgtcgaagaggcgcagacgtcccgcctcgttatcactgaggatcccagcagttgttctcgccgcagcactnnnnnnnnnnnnnnnnnnnnnnnnnnnnnnnnnnnnnnnnnnnnnnnnnnnnnnnnnnnnnnnnnnnnnnnnnnnnnnnnnnnnnnnnnnnnnnnnnnnnnnnnnnnnnnnnnnnnnnnnnnnnnnnnnnnnnnnnnnnnnnnnnnnnnnnnnnnnnnnnnnnnnnnnnnnnnnnnnnnnnnnnnnnnnnnnnnnnnnnnnnnnnnnnnnnnnnnnnnnnnnnnnnnnnnnnnnnnnnnnnnnnnnnnnnnnnnnnnnnnnnnnnnnnnnnnnnnnnnnnnnnnnnnnnnnnnnnnnnnnnnnnnnnnnnnnnnnnnnnnnnnnnnnnnnnnnnnnnnnnnnnnnnnnnnnnnnnnnnnnnnnnnnnnnnnnnnnnnnnnnnnnnnnnnnnnnnnnnnnnnnnnnnnnnnnnnnnnnnnnnnnnnnnnnnnnnnnnnnnnnnnnnnnnnnnnnnnnnnnnnnnnnnnnnnnnnnnnnnnnnnnnnnnnnnnnnnnnnnnnnnnnnnnnnnnnnnnnnnnnnnnnnnnnnnnnnnnnnnnnnnnnnnnnnnnnnnnnnnnnnnnnnnnnnnnnnnnnnnnnnnnnnnnnnnnnnnnnnnnnnnnnnnnnnnnnnnnnnnnnnnnnnnnnnnnnnnnnnnnnnnnnnnnnnnnnnnnnnnnnnnnnnnnnnnnnnnnnnnnnnnnnnnnnnnnntcctccccgccgccgcttgggtggggggggggtcgacgatgatggactcgttggagaattggtagtagatagttgtagactcaagactagaggataaaacctggaaaccagcctggatgccagagtcacgggcagaggtcgggaaagatatatttgctgtcagcacgaagaacttgcttgagggtgaggtattgaagggcactgctccagcattcgacaacgttttaccagactcgacaaaagatgagccggatgtgagagcgctgtaagtctccctggaaattgagattcccattgtttcaaggtcgatctgaccagagtcttcgcgggccacgcgccacgatgtcaaggactcacgcgaaagttcgttatccaccacgttagagatagtgcggacattcagctctcgcggcagtaagagggccccggtccagttttgttgagcggtagggaatcctttcacttgctcgaatagatctccagtgagccagacataggaaatgaaccgatcgggggcaccgctctttgtggatgcctgagagctggccggcaagatcttgcctgcagcagcatatgccgacacgccccagtcaagcacacccgccatggttggcttgaaagtgacagagccgtcatttgtgacattgccggtcacccacagcatatcgcgaatagaggagacttgaggaacgatgggaagtcccgaaccctcagcaccgagggttatgaatatctcgccgtcttcactatacccctctgcattcagactaaagacgttgccaacctcaaagttgaagccccaacccccggcccagtcaccctttccccaagtggtattaaggggctccttccaccattgcccgagatattcccaatattgaaaatctgcgtcgttctgacggtagaggaactgacaaggtccgacaccgtggacaccgccagatatggcgacataccatgttccttgggtactattgacagatttgtccagaattgggctttggaaaacgtaggggtcacggaaagcggtgacattgagagcaaacggaggcgtagggatcacgggcccttggttgagcttggtgaagttgtgaccaccgtcataggaaacggccaaggattgtgtctcgcttccccgggtgtaggggatggaccagtggattgggaggtatgatacagaggtatacagaagagttggcatgccgtctataccgcttggaatgaccgagccatcgaagacagaaagagggtcgttctttcctcctgcaacaattgacggggctccatcgggattgaggtctttataggtaacgagatcgtcggttgtcgctcccgaaatcccactgtaaagccaacccacgtggaagagaccagtcttgggatcggtatagtgcccgcacgggtcgcctatgttcccagatggagggagaagatgggctctgggtctccatgtcttgaaaagagatgcgtttgccagggtagaaaggtttggcggagccgagttatagtcaatcggggtatggaaatcaacagccaatgcccggtttgctaaacccacggtgattgcatttgatagcttcatagtgtagatcttgggtagctgttgaacttccggatatacacacctttatatgtctaatcttgccatgataaattgaccgaggtgggatgaagacaggagccaatagaaataggatctccttcaatatggatcttcttgtgacgttcatttcctctttggatggagtcggcagtttccgcaagtcaacggtaaaaccgcggggaaaccccggatgacaatttccccgatgcaaaaaaacacagggtctatgattttagttctagggaatagacaaaggcaatagccatggccgggtgctcccaggtgaagtattgtcgggaatccctgtcgtacccaaattggttgacggaaggccgcttgagaatcgttcgatgcctgatgtgtgccggtctggtgaatgaccagagcttgtggattctcacttgcaatgggttcggtggttggaaaactgggaggatctacaatgcctcggcaggcgtggcgtatcaatcacgacgtaatatggagattttccccttcaacccttgcatcaagaaagaagggtccacgaggatcgccgaatgaataagagcgccccgctcactcacactaagggcttacggcaaattgtgaacatatttgcgagcctggaagagactcgaaatttcaggtagatgaaagtagagccaaagcttggacacgactcacagctaagcataacctcaagccatgaaagactggtatcattttgttgaaagatccgtatatacattcaatcataagaaaaaccaagaacctagatcttctccgaagagtacaaacgaacaggcacgccataatcatgcgacatcgtaagattagatagtttgacaggctcctgtcgaggatgggggtccgcgttttcgagggtatcgaagtgctgcatcaaacgaacgacggtatagcttgcctcagtgagagcgtattgttctgaaagattgattgttagccactcattcaaggccatcttcgattttgtttctccggggaaagagaacatgcacaacttacgaccaaggcagatacgcggcccaccattgaaaggcaggtattcccagccatgcttagcattttcttcccatcgctcgggccggaaggaggccgcatccttaccccatagatccgtccgacggtgcatagcgtagacactgtaggcaaccatcgtgcccttcttgatataaaccggggattggtggtccgtaccaccgccgaccggtagggaggtgtcttttgtcgcaatgcggaagttgagaggcacaggaggctggagacgaaggactgggttggagttagtcggatatccattgatagtacacagcatatactgcatcaactcaccttcattcaacacatatcgcagataaggaatatccttcagcttcgtctgagtcatttccgaccgtggattctttgcgtctccgaaaatgtccacgatctcatgacgcagccggttccacacattggtgtgacgggaaagatagaagaaggtcgagctcagcagactagctgtagtatcgcgaccagccaatagaatattgagcatgttatcgcgtagaattttagggtcatccgtctcagcgaccaatgcttcgaggaagatataccgaccgtcagcatttcccttttctgagttccgtttcgactctagagcgagattaacatagtgatcgacaacttcgtgcacctggcgatttgcctcgcggaattccttgggattaacaacccaataaattccctgggcgcgactccgcgcagcgagataatcctgcgcggtcccgaaggcgttggcgaaaccctgcgcgctaccgacggcgcatttttccagcacgcctgtcttcccagaaggggggagcatgcaccccacggattccccgaacaggaagtgcgttgccgagtccagggtcagcaggaaaaacaaacgctggatgtcgaaactgcttctatccttggggatcaggtcgatcaggttggagatgtggtcgtccaacatggaaagatcggcgacctgtcacctcggtcaatcacatgtgcataaattctccgacaaagttttagttacctggtccctggtgaactgcgggcgcaacaatccccgcgcatgcgaccacccggcaccatcgagggtgaagatgccatcgcctagcagtgggtagaattgttgatgtcttgttccgagagagaaatctttgaattgggtcgcgagaattgctttgacattttcaggctcgatggtggtcatgatattctgagacaggaatgtctgtctgtaggtatttccatagacagcatattcgtcacagagatactcgatccagcgcttctcacgaacagccttactcaaccgaagaaagtccggaataccgaagaaagtcgaagagcccgaacgagcaggcttgcaatgcagagccctggattgtttacggtgatgacgtagctgtacgaagtagcgcacaaccaagaaggcagaaagcacggcaaccagggcaaatgtagggaatagcatttcgttaacgtatatgaattggaagaaacagcagtcaaatatgtgaatggaaatctaactcttatgatatgtccatggcctcccacgtgaaaaaagcggagatcgcaagctgattcaaaacgggaatagtgtcgaatggggagagaccgtcgcttgaaccttccagggtttagcaattaccaagccttggcctagaagcatccgagccattctttcaacgccgtgcggaagtatcctcgggaaatcgcccctggcacaaatgtcgtgcggaaatcaaagcagtgttccgcattctgcatgatgtaaccaaagaccgtattttccgccgtctcaacattgcacttggggatttcggtcgtgagagacactccttgcggggctaaccgagtgccggccgcgaggggcgacaaagtgcgccacggatcaaactggccgccgctccagtaaacgttggacggacgaatggtccatccgccagtttccgtgttgatagcgtcgacctgcgggtgtttagggaacagaccctttttgacagcctccgggaatgatcgttcgcagtattcctgcgcataatcgagggtctggtatctggacagcaacgagtgaggcccgaagttgtcggtctggaagaatccccattcggtgcagtactgccatgtccagctgatggtgtctgggtcggtggatggtgcgccaagatcgcatacgagcggatcgctggcttcaagcttcctgcagttggtattcaaattcatgttgaccaactgcgtgaaaggcggccatgacgcatatcgctccgcggcgtacttcttcccccggctgggagcgaatccatgcgggggcgccgctgcgctagtcttcgggtcggtctccatgtgctcgcagaatgaccccagactgcccaaaccaccttccatgccataagactggtaatagtagtagatgatcgtgagcgcggcggtgaaatcgccgttgctgtttttttcggcgccttcaccgaagaattttcgcttgatggccgccgcggacgatttgctcttcgatagttcctcgtcgatgtattcaagtgcagccttgatgtcgctggtgcagttagagtgtccatatgcgaccatgccgtcatacacctggtcgaaatagacgctcatgtcgatccgcgcttccacgggcgcggaggaagcgtaggaagcataaattgtatcggggtacaaatgacgggtgaacgcagctcgcatgccagagtacgagcctccaaccatgacccatggtgttgcgcttggagttaggttcacatcgctgtaattttcgcgagtgaagttggcggcaaagaatgggatgtctgcaagagcctgtttattgttgaggtactggagatgctcaggcctcatgttccggctgacgttgtagggaagagaatccccatagtatctacttggtgttaattgagtccgagctttcactggggagaggatacaaaccggtgttcccagacaataccgattccaccgaaatccctgaccaactgatagaagaacgtggtcgaattgcccagaaaggtttgagccgaggattcggcatttccttcaccaacatcatatatgaagaccggtcctcctgcctggtaatgctcttcggatacccaatagcggttctggtaatcaccaaccgaagagttactgtgatcaatcgggagctacacatcgtcagcattcatctccgtcttcaagaaattggaaagtctcacataccgaaacatattctgcctcaacaaccacatcaagctgggcatttgaaacagcatacaccgaggtcttctgactgagtaggatatccggatagacccccagctcagcggaaagcttcagatcgcgcttgaatgacgatgtgacaattcctgcagctgtaccagacagcgcagccaggactgcagtcccccgaacgatagttgaaaaatgcatattgactgacagtgccttttgagtctctcaaaaactcaaggacacacggatagagaatagctttcgactatctcgggtcccttacagaatatatatgcattatggagataggctacaagcgcggaaatgacaaggcgaatcagaggacattatatgagaacaatatgataagaacaatatggttgcgtttgtcgcaaggccgcagtcatctggaaaaggtggattgcgcattcggggcacccgataggatcagcgacgagtggacaccatcaggcacacccgagacatggccatcgcgtgcggccagtagctgcgtctgtatgacccggggcgagaggtcacggagtctaatttctggggagtttgagttggatgtaacctacttagcacggcataaggtgtatgtctcgaattaattagccatttcccccaattacccctcgttttgattactatcagcacttggcaacgctgtgataactgtgcattgcattagtgatgtagtacctccctgctagctcatgttgactatcacttcccgattcggcagaatgcgatcgtcgacagattcagcgaagaactcctgagacccgtggtgtttatcgaattcgattaattaactttctagtcttagaccgagcaacaaacttccgcatctgggtttatctaaaaacaagcaccacgcgacgtccaaacccccgtcactgggggtggatcccgaaaccaggtctgaaatcggggtcgatcattggccatgggactccgaacaggtcaaccggactccgaacaatatcccgaccttagtattgttgtgtgtgattgtttaattagcatcgccgtctctctaccgattcaattcatgatattgtcttgtctcggcatcttcctagaagcacgtctggaaacggtggttgtggaatgttgatctggaatgtctgcgccagttggaaaagccaattttgcgctcgacgtagaaacaaacatagttcactgtggcttggattgacatggaaggattattccacatgcttttcttcttcacgggactccgggaccaggcccgtccctctactacggctagagtatattatacatcaatatcacatcaatcgaaaggttatacacggaaagtcttacggtttatgctttttgccgttcatagagaagacatctagaaagactacaaaaaatacatgaagtttaggcatactcttgtctatactaattaagactagcggtgagccagttcaagatctactacagtaaaatatgatatagcacactggccagactagtcataatgtgatacaaaggtctcctcggatatacgaaggaagcaagaggaggcatcatggatgttgttattgtatggtgaatcctggtgattatgcggggtagaactacgaggttatagacctacaggtactaaaatatacaagctcatctagttaataacctagttagtaacctctaatttgtaatcatgtaaaccccgatattcgaagaatatttgttccgaatcagagtctaacacatgcttctactaactctgtgtaaggtggcacaattccacccataggcaagaaaggcaaacatacatcgttactctgtaccagacttttaattgatcattcgcaggataattatttgaaatcaagctacacttagagtacactgtggcaagagaaagaaaagaatacacctgtgtgtcccaaaaaggaaagtctgacgaggcctcggcacgccttccacctttatcaagcccctcatcccatcgctttctccaggctgctcggctatggaaatcggactcggcccgatttgcgactatggcctgcagagtgtgacgatttgtaataatggagtatgtcatctttgttacatgaagagcaagtgacctccacgggcactccggcccagtttccaactctgacacctaccagcatataaagccacggcgtcccttccctcacgaaagccacttcttgaataaccaccctattgcaaaggaagtatccaatcatgccgcaaacatctcgcttgcaagacaaagtagccatcgtcaccggatcctcatccggcctaggacgagcgattgctattcgctatgcccaagagggagcaaaagtagtctgcgctgacctgacaccaactgcccgatcccaagaggagtctaatatcacaacgcacgatctcatcgtcagggatggtggtcaggcgaaattcgtgaagacggatgtaggggatgcaaagcagatggagaacttggtccaggtcgctgtgaaagaatatggacgagtggacatgtatgaaatgataatgaaggtcttcgattatccttctgacgatttatttagtctagtcaataatgctgggatcagcattgaggcacgcacgcctgctgtgctacatctgaccgacgagacaacctgggacatgacgatgcgtgttaacactaagtctgtgtttctgggttgcaaatatgctcttagtcaaatgctggctcaagaacctcattcttctggggaccgtggctggatcatcaacatttcttcaattatgggtatgattggtgggccggagaatcgtgagtttcaactcggtctgtggatctgaatgttgctgatacttgagctagcgtcgtactgtgcatcaaagggtgctgtgagtaatctcacgagacagatggcgctggattatgcctctgataacattcatattaatgctatttgtcctggctgtaagtcaattggtttgaggattagctgaatattcactgacaaagctttagacacccaaacagctatattcaaagagacaattactaacttgactccttgggaagacctaaaacggcgccatccattgaaaggacctggaacaccggaggatattgctcgtatagctgttgtgttggcaagtgatgacgcaaactggatgactggagtttgtcttccagttgatggcgggtatactgctcgttaagtagtttactgttagtctattgacgcttcacgattttctagctgctctcctagtgcaattttgaagtgttcgaaacagtatattcctaagcttgatatcagaaacaaaacgacttgactacattaatgcaattgtaatgactaaaaggcatctaaaagctcacgcaacatattctgggggtgcagccaccgccgccttcggggggcgtgacactctcttaccttgaggatccgaactcgcagcttgatcagcccaattccgaataagcatagtcacctcctcatccctgctactctgggaagcagtatacccaatggagtccttaatcttagtggaagcaccgttctcaagcagaagacgagccatctcaagattgcgagtatcagcagcgagatgaagagccctcttcccatcacctcctttcagatcaacggggacgccattatcgagaaaaacctgaacaacatcacatttccccgcctcaacagcctcatggaagaggagctccttatatccatcccgcgctttgggcgagaccctcttactgcgaagaaaaacatcgactacatcagcatgtccctcttttacagcgtagacaagcggcgtatgctggcaaaaatcctgcattttaacttgcgccgtcacaccaatcatgcgaagtctccagcccggcttatgggcgtcgtcgtattgtatgagaagtttgcagacttcgtggtgaccgtttcgccaagggcggaggattttgtcgagggttgaagcttaggagctgaactagttctgtgtttccacttttagcagcaaagtgtaacggtgtctcgcctcgtttgttgaaagaacttcctgtcgctcggtcgcattcgaggagcagtcgggctgtctctagatggccgccttttgcggcgttgtggatagggagtgcatcgttggcatctcgggcccatggtgacatgctcttttctaggaggagtcgggcgatgtcccagtggccttgttctgctgcagcatgaagaggtgaggagcctagtgagtctaccacgtggatgtctgctccgttgtcgagaagtattttgacagcttcgagatcgccgctttttgcggcttcatggagtgactcatgggtggtttcatttgtttctcctttgttggacatggctttgggatatgtaaactatgacgtggtcagtttcgaaatagtagactatcccggggtagtgcgcatcttttatatgcctgaaagaatcctcggttgtagtaagaatcccaaattttgggtgtttgctgctcattggatgtgtagcctgtccgatcttctcgtatagggaaaataactgcgccccattaatctagagcgaaagcatctggtcgctcgttaaatattacttcttcttggacaagttcatgatgatctcaattcgaggactaagaaatactcagcccataaataccccaaggcaggctctcccgcttctgtacctgctctctctctctctctctctctgtacatgtcctagtaggtacggagtaggaactaaaaggacaatgcgctaatcctaatctagttgaaagtaagttgactatataatggtaaattaatgcgcgggatccatcagtatgaagctattcagagatcaccctatcaccatggagtaattcaaatggcttctactaccactaccattgatgaagatatttcaatcctgaaaactgcattgaaatgctagatagtagagtattgaatgaattaaatgtgcctagtaacgaggttctagatctggggatatccccagggaatcacaacattcgcctcagaaaaagcaatataaactttctcccagccaccgctaagcggtctaccacggcaatacctctccattttgcttccttcctcgtgtgttaatttcttttgccttttcattgagtcatccccaaaatatcacaacgcgaattatgaactatgccctggcacgactaaattccttctctcacgctccatgaaagagagctggacccgcccggttccagtacataccccaagatggcaaggcaagcaagtggaaagcatcagcatagcggcatgctatctgatgttcggggataatgtcaaactgttactgaagtgataacaacagtaaacccgtctcgtcatccaaatggggttaaggtacggagtagtgtgggcaattgttaaatccaaccaatgaacactcaaagcacccctgtgtactaaccggatgtagttagcatattgtcagcatcacccttaactacttctttcgcggatttaagcattcggaacggactaaataaagaggtatataatcggcattgctctcccataactagtctctcttttgacctcacgtacatcaattacatcaattaccaaaatgcatcttatcctcacaggggccaccgggctggttgggtcctcagtgctcgacgccatgctcaaaaacgcagcagtgtccaagatctcaatcctgagccgaagccccgtgcgaatggcagaagacgcaaaagatccacgagtacatgtcatcacccacacagactttgaatcatacaagccagagctgctcaaccaattgaaagatgcggatggatgtgtttgggccctagggataagccagactaaggtcaccaaagagtacgagagatcccactcctacgtggatatcagaactaataatcactagacaatacgtcaagataaccaaggattataccctggcggctgccaatgcgttttccacaatcaagccatcaaatcatcccttccgattcatccatgtatctggcgaaggagccacccagactcctgggcgattctcgccgatatttgcgagagtaaagggcgagacagaagcgctgcttggaacgctgtccgagcaaaatccgacctttcgggtcgatagcgtgaggcctgcattcgttgatccggcgacgcacgatgccatcaaaccatatattccatctggtgcaacggctggagttgttgcaaatcttggagtagcgttgcttggcccgggtattcggtgctttatgaagtcgatgcattctccaacggaacagcttgggtcgttcttgacggaaatggcgatgggacgctatgaagcaaaattggagggtccgggggtattcagactgggaggaggttatgtcattgagaacattggtatgcggagaattttggggctgtgagcatctaagtatttaactgtttttttgttcttactcgttcctaatggcctaataatcaactccaccgacaattgacaccgattcgaatttggcacgcaaacttaccccctccactctagtctgaaagggaaggaaaatgagaagaagccatatgttgaattgagctaatggccaggaagtcccatcctgccttgggcagtaaggctacgtcaaccaaatttgtattccagaaagacaaacaaaaagaaatactgaggatatgacaaggtcgcataagcgggcggctatttttgtacagtgtatacacttgaaagcatatattatctaaaaatctcaatgaatatctgtcaactgcctaatcataaagaaatgaaagttagtattaaccacgatagtaaacccgggcgatcatgactcgaaggggaagccgggcaagtacaaaggatgttgacagatataaacatgacctggcgatgtctattgagccccatcttgggcaggaaggtgttgagaagcgtaacagctgccaagcggattttcgctcaccgaggggatattgttctttgttaacacagcgtaggacatatttgggatttcttatccaatcaactccacgtcctcgtggagatcggggttcacagaacgctgatctcgacctgtaaaagtgacacaatagacaatcctccccgtctgaataagaaaccttttaaagaaacatccttatgcttatttatgacgtgtcgccaatcttgccttcattacgaatataaataaagagacgaactgctgtactgaaacggccacgccacatcagcctactttacttcgatacaagatgaagtacttccaacttggtagtatcctcgccttatgcagcatggttttggccgccgcaattccagacgcctcgcctgatagtcttccatgtctaccacaagggggaggtcgcaacaacaaacctattgtgccgggcaccgagtgtggggatttctggtagggctgatctgcccatcagagcagacatgtttgtgaaaaggtacgtagatcctttcccgacagtttcatcttagaacataaacttactcgactactagccgtgcttcagagcgtgtttgacctggctcgaccctctgccttggtacttgctccgctggattgtgaattttctgttattcgtgccttccaatactcctattttggaacaatctgtttgtatgactcaatgtctcgggatctcacgttctttcttcgttgactatgtgtacgatggctgggagccatttcaatatcattctttaacggtgataattctgtgtagtacgctatccatgatcctttcgtgatatcacagtttacatatcttcttgatcgatcccatacttttcccagttcgtagaaggaaagagaaacgccaaaggccaaaaataattatatactccgtagaccgcaaagcgcgagagagggtggttgcccgagaaaggtgcttaggtaaacatgaaggcatcaacttcctcttggcagagggccactaatcatcttgaactctcaggaacctcatgacctgtacggaatagtcattttgaaacggttgagtgcatatccagtcacctccttattttttccattaggaagtattgagtgatgaatgcgccaattacctccaagataacatccacgtccccaatgctgtctcggcctttcggcgaaagtagtccgcacttcggaaagcggaatgattcttttccatcaaataaaggcgggatccatcacagcatcaagatgtttcaagtacatatcggattcctccactactgcagacgctccgtgggattgaaacaatcgtcaccccacacggagttacagggggtcttggcaaggagctgcatgcaccctggccttgtgcttatttttaacaaccggccttagtctcgagtctgcagattgtccgttcctagaatggcaattatccagctgccaaggagccagaaacgtcgcgcattggtggaactatgggcaaattcatgcaggaacggagcttcagttcgctgccgaatctccaccttccaacatggagcgtttcaacatgaagaaacaaaagtgctctcctactataatatgctgcttgtctgcccttgatagtttcttgtgggacacgagaaggctctctacaatacacgttggacatgatgtttttcaagtccttggccattgcttcgctagcactttgggctaagcaggcatccgcggccttcggaatcactactagcactgcttcctatgtgattgatgctggctctacaaacccgcttaaatttaccgtcagccggacaaactgtgacattacttcgatcaattactatggatccgagcttcaataccagtcgactggatctcatatcggatcgggtcttggtagcgcaactgtgtctgccacgcagagtggtgagttgagaaacaagacgtctgttggaaaatattctgatcagtataggcgactacatcaaggtgacctgcgaaacatccaccttgacacactactatgttgtccacaacggagattcgaccatccacatggcgacatacacaaccgcaggttagtgttgttcgtgcgcaaatgtgttttttatactcattataatcagaacctacaattggagaacttcgatatatcgcgcgcctgaattcagccctgctgccgaatgaagagccattcggtgttgtctctaatattgcaggtggcactgtcgtcgagggagaggatgtggtacgtttttttctgaagctttttttcaatacaaacagctgacacatattagttcttggttagtggacaaacgcgaagcaagttctactcgagcgaacggtttattgatgaccacatccactgtaagaatacctctaccctggccgatgcgagtcgatttaacacaaacaggtgtctctggaagcgcgcaccgtgtctgcatgatcttaaatcaatatgagacatctgctggcggacctttccatcggtaagctcctcatacagcatgacttgatccagactaacatgcaccagtgatatcaacaccaacaatgttggttcttatactggcctatactggtacatggtatgtggaatctgtcgctcaatcagtaactgcctcttactctatacagaactccggacacgttcagaccgagacctaccgccagggcctgcacggcccatactcgatggtcttcagccgaagcggtacccccagttccacccttgacacatcgttctttgccgatctcagtatcaagggatacgtcgccacatctgcgagaggctatgttacgggtactgcaaccggggctgactcgactttcaaatgggtggttcactggtaggtccgatgcaatacctggatgagtacatatctaactccaagacaggtataactctgccgcacagtactggacctacacttcgtcttccggagctttcacctcccctgctatgaagcccggcacttacaccatggtatactaccagggcgaatatgtcgttgccacctcgtcagtgactgttactgccggatcaaccacatcgaagagtatctccgggtctgtgaagaccggaacgacagtcttcaagattggagactgggatggaacgtaagttcattgattttaacccacataattgttccgatattgactgcccatagaccgaacggcttcctcaacgcggccaaccagctccgtatgcatccctccgatacccgcatgtcttcctggtccccgaccacctacacagtcggcagctctcaagtctcttctttccccatggccctcttcaaatcggtcaattcacctttgacgattaaattcacggcatcatcttcgcagaccggagctgcgacgctgagaattggcacaaccctctcctttgcgtctggccggccccaggttgtggtatgttcaagcacattcactttctatactcttagcatgtatctaacttttacacagttcaacaactattccggcgccaccccggctgccccgactaacctcaactcccgtggcgtcactcgcggtgcgtatagagggtttggcgaggtttacgacgtttcgataccggctggaactatcgtcgctggaactaacactgtaaggacttttgagcccagtcagatgatatgatgctaatccggcctagatcaccatcagcgttgcttctggtagctctggagacacttacctgagcccgaactttgtgagtatctttctggttatctggtctttccgatgtaagcttacctgtctcaatagatcttcgattgcgtggagctcttccagtaaataattgggacaaacgattgagttttggaacgcacagaggagcataggggaagtttctctaagtaacaagaatgcgaatcgccgtatcttccaatatcacttaatttcctgttgtaataacgccttttgaaggtaaatcacagaagatgtcataatatagactagatatcatatgtagaaaaagatctaagaaaaacacatagacaatgctcaaacccttgaatggaccaaccttcccccaacccagacagccttcacattccgatcatcgccactccaaacccacttctgaatcttctcctcccaattctccgtcccaaacagatcaacatttcccacaggaccagccttcacaagatctgaactaccatcagaaacaacatccagcggactcgcctccaccagcttaaccccaccaagccgaatcagctgtacatcccacaacatccccctatcaaacccaccaacatcgctcgccatatcaacaaccgccgcgccaccacgcgtagcaaggtaaagactctctgaaacagacaatttctcccgtccatcagagccatcaccctgaggatgatccctttgccacgcagccgattgacccagcaaccgcgaagcaagacaagcctggcgcgccgcctcaagaatactaggactatacccaccactaacatccgtccccagcccaaccgtaatcccctcatcaagcaacgtcctaacaggacaaatcccagaccccagcgccgaatttgacgccggacagtgcgagaccttcgcttcgcgcgcgcggatcagagaccgctcatcggccgagagatgcaccgcatgcgcgagaatcgtgcgcggcgtgagcaggttgtacttatcgtagacggcggcgtagctgcccgcctccgggaagagctctttgacgagcgcgagctcgttgatgttctctgagatgtgcgtctggatgtgcagcgggggcgaatagctcgctgccagctcgccgaggccctgtagtgcggggcgcgtgcatgagggtgcgaagcgcggtgtgacgatcggcttcacgagcttgccttctgggtctagggtgtggatgtgctcgattgtctggcgggttgcgacgatggagtcgtcggcgctgaagtcgcggtagtagtctacgcagaagtctgggttgtccatgcaggcgcggccgatgaaggcgcgttggccgcgcgtgtggcagagcgatgagagggcgtttgtggcggcgacgtggttggttgcgtagtaggaggcgcaggttgtgccgtgggagagagtgcgggagattacttggtcgtagatttgctgcgctaggaggggtgtgtctttagggtcggttttggtttggtggcctgtttttgggtccggtggtgacccgaaccgggactctactgggaatgtgtaggtctctagccagtctaggagtgttgatgagccgaagaggcccgcgttggggtattgtggggcatggatgtgggtgtctgggtagatgtagttaatattaagatttggccgtccggattagggtttaggaagttggatttgatgcataccaataaatccggggaagaagaactcattttgctcctcactcgcggtgacaatcttcactctgaccttcgaatcatggccccgggtctcaatggcgtcgatattaacccaaccattcctattcatgaattcgatgaactgattctcatcactgccgtgccagtcccaaccttgaatgcggccatcagcagcagagacccataatgcgccttggttgcgagacaattcaggcttggagctagagtctgaaagaaccgtttgaatgaatgtgccacgatagacggtaaaaccatagtccgtttgcgatcccatattggcgggatatttaaaaggcccaattattggcgtagatatgatcaagttgcggacagatggcgctctccaaaaggactagaccacgaataccgatgtatattatcgatgaaaatgcagatcagtctctacagtggaaataaaaagaccgaaagaccaagtcgaaacgaacaaggcgaaaaaagagggtcaggcacacgtttatatctgtcttctggttacttcttgccaagcgagcggctgagataggtgtccggaaacggtggacccaagatgtggagaatttcgatgttgtccctgcttgattcgaatgttcttcagcttcctttgcggcattcaaggcttgattgtaggttgcgaggatgattagggccacggcgagtattggggatggcgggggtcggccgtctccgatagcaatacggtgaggatacggtatttggagcgggtgagtttttttttgatggtgtaatttacggacgggcagtactgtatggtcacaaagcaccgataaggccgtcaaaagcctcaagtttacatataaagctagtgaatgtcgtgatttgttactcttcttattgtttcaaagattttcttacactggatcgaattgaatgtctagaatattttttattctttgaattgttttgttcttggtatccatggatgccggatgattatgttgaatcgatccagcgctcacaagaatgtagtctgtaggtagtctttgttaccgtcaatataaaaaaaatgttgaatgtatacacagagaaaaggaagcatcagaacgagcccccatatataaaaaaaagcaatcagcgcggcatgggtatcatagatctttcaagatctgtctaatcagtatcctcgacaggcccgcaagtgcagaacaagttctggtcaccaaaggcatcatcgacacgagtcactgtcggccagaacttcttctccaaaagcaaaggcaacgggtaagcagccttctcacgggtgtaagggcggtcccactcggtaatgagcaggtcgcgctgagtgtgtggggacatcttcagcacgttgccctcgcgaggctgggcaccagactcgacctcgctgatctcctggcggatggagatcaaggcatcgcagaagcggtccagttcagccttactctcggactcggtgggctcgatcataagggtgttggagacgggccaggacatggtcggggcgtggaagccgtaatcctggagacgcttggcgatatcaatggcctcgacaccagaggtctccttgaaggggcgcacgtcaagaatgaactcgtgtgcgcagcggccgtgctcgttggtatataggatcgagtagtagggcttcaggcgggagaggatgtagtttgcgttgaggagggtgatcttggtggcatgggtcagaccgcggtcgcccatcatgttgatgtagttgaaggtgatgggcaagatgctggcactgccccagggagcagcggagatgggaggggagaaggtgtcgccacgcttggactgcaggtactcgctgattgggtgcgagggcaggaagggacgcaggtgctcgccgacaccaatgggtcccacgccggggccaccgccaccgtggggaatacagaaggtcttgtggaggttcaagtggcacacatcggcgccaatctcaccgggcgagcagagaccgatctgggcgttcatgttggcaccgtccatgtagacctggccgccgtgctcgtgcaccaggcgacaggcctccttggcaccgggctcgaacacaccgaaggtgctggggtaggtgatcatgaacgcagccaactcgtccttgtgcttctcgcacttggccttcaggtcctccagatcgaggttaccggtcttggtgtcacacttgatgctcacaacgcgcataccagccatggcagcactagcggggttggtaccgtgagcagagacagggatcaagcacacgttgcgcttggcatcacccttggcctcaaagtacttcttgacaacacgaagaccggcgaactcaccctgggcacccgagttgggctgcacagtaacctcagccataccggtgatatcagctagctggcgctccagatcgtcaatcatctttgtgtagcccttggcttgctcggcaggcatgaaggggtgaatctgggagaactcgggccaagagatgggaatcatttccgtggtagcgttgagcttcatggtgcaagatccgaggggaatcatggagtgggccagggaaagatccttcgattcgaggtggtggatgtaccggagcatctcagtctcggagtggtaggtgttgaagactgggtgggtcaggtaagaggaggtacgctcaaggctggcgggaatagtggcgagaccaagagtaccatcaacctcgacgggagaggcagacttgtgagcggcaaagacattcaaaatgcccttcacctcatcccggccaacagtctcgtcaagagagagaccaaccttgtttccacccagacggcggaggtagacagaggcagcgcgggcctcggccataatggcatcagcttccgcagcactgggcagttcaatggtcaaagtgtcaaacacaacgccaccgtcagcgctgttagagcggacagggacatcatagcccaagctgacaagcttctcgcgcagcaatgacgtcatggacatgatacgctgggcaatggccttgaggccagcagggccgtggtagatagcatacatggcagtcatgttagcaagcaaagcctgagcagtgcaaatgttgctggtagccttctcgcggcgaatgtgttgctcgcgagtctgcagagccaggcgcagagcccggttaccaaggcggtccttggatacaccaacgacacgacctggcaccttgcgcttgtacttgtcagcacaggcgaagaatgaggcgtgggggccaccaaaacccatgggaacacccagacgctgggcacttccgaacgcaatatcagcaccaaactcgccgggggccttcagaacggtcaaagccagcaggtcagtggctacacagaatgtaccaccctggccgtggatagagtcacccagagcctggaagtcgtagatacctccctcggtatcggggtactgggcaagtacaccaatcaagtggtccttctggtccttgacgatcttgaagtcatcggccaagatgtctccaatcacgaggttgattccgaatccatcggcgcgggacttcatcactgcaatagtctgagggtggcagaggtgagacacaacgaaggacttctcggccttcttctgcttggaagtgggcattgtggcgtaggacatggtcatagcctcggcagcggcggtggcttcgtccaaaacggaggcattggcaaaggccataccagtcagatcagcagtcagggtctggaagttcagcagagactccaaacggccctggctgatctcgggctggtagggtgtgtagctagtgtaccaggcagggttctcgagaacattgcgctggataaccggaggcacaatggtggggtagtagccggttccaatataagtcttgccggagatatcaatctgcttccggtaggtgtccagcagcttgagcatatcggtttctcccaaacctcccagctcactggagcggtacaggctgatatcggcatggggctcggagaccttgaggtccttcgtggagagaatgtctgcgggcaggacctgcttcacgaattcatccaaggatcccaccggcgggtcgagcacggcgagcatctctgccgcggcgtccggggaggggccaatgtggcggcgagggaaggtatcgagaggctggaagatatccttggggtggatctctccattgtcggagacggagctagtatgaacagcacgacgaggcacaggctgagaagtagtcaatggtctccgagtgttcaatggtgacaatgaagatcgggcaattgaaggcacacgaacacgcgaccgcagagcaagctggcggccgccgcggagggcgaatagtgatgccgccatactgagaccggaggataatgagggctttagggaaagcactcaacacatccacaagtaaatcagtgaatcaatgagttaggaggatgaagaagaagacaaaaagagccacagctccagaaattaatatttattgcccacgcctctttcctttccctgtccgatcgtccgatgacggagaacctgtcgggaaacgtacagcggcgataagaaattataagaacatttcttatctgaccaatcgcagctgccactatttgccactggccccagcttgaccactgaccgccttctgctcggagcaactagccggtttcccgtcggggaagtcacgggccattgatctacgttactccacgaattccccgccgaaggggaagctccgatggtctcatagctttccttgagcttcggtttatggtcgtttgggagaatacgacatactaaaaataaaaaaggcctgctttcattactatctcaatcccgcctaggacagaatatttcttcgggctcaaatcgtatatcggaaggctgcatcaccctcaatgacccgctttccccggtccgcctgcttattacagatccggaaccacagactcaatcccaggactagcaggacgatgagaatgttacacctggtgaaacaaagtcagtacacgaaaataatctgagacaggagggacaacgtacccaatagcggcatacattccgggtcggtactcgggtgcgtcctgttcccgaaacaccaagctactcacgataccaccgaggcctccaaagcccaccagtgtagcactggagaaagcacgtgtccactgtccgcgcacattgttcgcctggtatgccatgcaggctgggatattagcattggcaccggcaacagtgaagaacacgccgaagtagcggacggcatcgctcttagcgaagcccattaacggcaggccaattatcgcgagcaaggcgttgaaaatgagaatcggggcgcgcatgtggtacttgtcgccaacccaggccgtggcgtacatgacgattcctgcgaacccgtaaggcggcgcgacaaggcattgggcttggccgacgccgtatcccatcccggacatgaggattatgggcaggaaatatgcgatggcgtaagtgacggtagtgagacagctgggatgcggttagcagtaatcgggtctgcttgaaaagggaacgcacaagaagatcatggcaaacccccagatcttaagatccactgccggtttgaggaactttttgagagagaaggcctccatatcgccatcgtttctgtccttattgatgcgacggatgatgaatgcgcattccctctcgtttaggaagttccaggacttgtgtgcgcggtcggggaaatcgacgaggaagaaaaagcataggatgccaatacagccggtgatctatattttttgttagcttggttttttttttgggttgacccaactctccataccactccctcaaggatgaaaatccatctccagccggtcaggccttgctttccgttcaattgcatcagaccaaacgcaaggatacccgccaacgcagaagcaacacatccaatgagatagaaaacggagaatcgtttttggacgtcatctttgaagagtcagtactgtgcagtcgctcggagatattcctttcggccatttatcttacatcgggtataccagcaagacagcaagtagacgcagccaggaaagtaaccagcttccaacacacccaaaagcacacgcgttccaaccaacgcgccccagtcctggacgaatcccatcccctgcgtcggtcagcaacccaaagtcttgacgtcgagaaggcagaaatcccttacaatcatgatccccgcccagcatagaataatcgagcccaggaagtaagttgggccaacttttcgaatgatgacggtcatcggtggttggaagagaatatagggcacaaagaacatcaggacgacaatggactattcagaagttagcccttcgccctccgagaaatggaactcgtttgtttgaacatacatagcgctcccctatgtccaatcgcaattcctttttcaatctttccatgggtcagccatttttgaacacggtctcctcgatgattgtagtcttaccctgcaacggcggccatgctcaaattcgtccggtccatgagcgagatgcaataagctaatccagtcattgtcaccagacgcagatcaattctccgaataatcttcttctgctcctgcggtgtgaactcatcgtcatcgtcgctgggaaggctcttccccacgatgtcctcgatgcggtgatcagcaggtagtttctcatcgatgggagtcattgtccccatgctgattctgaattgaattgggatatttaatagaaagataagatgcaggggacagcaagaaaaaagaattcaattgtcttgggccagaaatagaagacaaatctgcggccttatcttacagaacgacaaggatcaagaatttatatatccaagtagaaacacaccgcacaataaaccaaccattcctaaaccagccattcaagatcgccgctcgcttattgcaacccgcttcaagctgcccaggaaattccccaagaaacaagacaatcgagatcgcaatagccgacagaaagtggccaagtgcctcgggacgagcacaattgtcgtatagcaagggaatacgccgcaatatcgtccgaaaaacaaatgagggggtaatcaccccactgtggacaaactgtacgagttatctcttacgcattgagctggttagcatcggtggcggctgctttgggagataatccgggggcgatggggaagaaatgcgggggaaggtacttggcaacttggcaaatggtgcgttgactacgtgatgcactttgatcccctctttcgtttggtgctttagtctgattgttgggcagagatgtcacttgtgggactcgagatgatctgttctgtatgtggtttgttgccaatgtttcttggttagggtttcttgacttttgattcacgtactttgtcattgttagcgggaaaatcaaccgggcccctcctgacttgtttctaaaatttcaagctgagtagggggatattccgaggctgatctcgtactcgtcggcgggtcaggaagtgccacctggttatgaggaaccttaatattccatctctcttgatacgtcgaagctcgaagaatccgaaagtataacttgccatgtagaaaagtatatataatcctggtcatgctagtatgatcctggtcttctgccggcagatagatagcgccgtgtatggtgatatcatcaccatgcatggataacctaggtatatccaagttctgtggcaagcggttggttcttaatacagcccactatagacgaatctgtcatttgacacacgtggtggatggatatccaccttataaagttgctataaagacacggagcctgattatagacggtggataaaaagtattgaccttactatcgtcaattaaattctttttttacacctcggttcgatcctaaaatgctaagctgattaaaggtagcttccatcatcctcgtattcgtcctcttcttcatcctcttctaaaaggagtctctcacgttcttcctcatccacccgacccttctccctcagctgcctcacagacacgaaaacaaagattacgagtgatgttccaacaatgaatcccgcgattgccaagacaacattgattggaattgggtttccatcaaacgtatgatgcgtcaatgcgtcgagcccgtactgagagaagtttgcgattccggagaggcaaataatggcaccgtacacacgcccaaatgtggcaaagccgaatacttttgtagtataatcactagaaccaaggattagtaagtagaatttggcagggggggaaaagcagcatacgacatggccgagtaatagagaggccggagcaagacaaacagcaaaacggtcatataaccagcccaaactgccgggatggagttcagtacaccaatgaccgtagtgaaaagcacaatcagccccagcatcgttggaacgctaaggcgatcaagcagaaagccgatcaccggcgtgaagagaacgcccccgaccggtagtgcgacgtcgaaaaaggcacctattttatttgcctcctcgatcgattcgagcatgtactcatactgcgagcgaatcgtggcaataaagtagttcatgcgaatcatttgcaaaacagtcatcagtgtaatcaggataaaccacggcgttgccatctgtttatgtgccggcaggccatgcaacacaccccacacccaactcgtctgctggcgatcttcttctcgttccgcacgcatctgcctttcatctctatcaccaagcaccgcatcgatctggcgaagctttttctttctccgctccgcccgacgtttcctcacccggtttagctccgacgtgctctcaatttcatcgtcggagtcgtggacgtcgcgtgtagcgtcttcggccttttctaacttgctctgcaagtttagagtcgagacataatcgcgcactggcatgatcgtcaccagcgcgatgaaaatacatacggggactatcagatagcccaaaaagaatttgtccggggtgaaggatctgcccgatttctcatagacgagccggtagaagaggaacacagcagcagaggcatcgaatgcaccagtcaccagcgcgacgatcgaacctgcatatttagggaacgcatttgcaatttggaacgaggggacaaataaaaaggtgccagccagagcgaggaagaagttccccgcgatgtagccatcgaagccgggttcatggaacgcaaaggccatgatgacagcgccgatggcaagaagcaggcaagcaatgaaccagcagatacgtgatccgcatcgatccaaaactgtcccaactggcagagcggagacatttgctgttatcgaagcaatagtgaagaacaggttgagtctagcatttgattagtggcaagcacatatccgggagtctgtgcaacactgtgcaacaagcatacccaaggtcctgctgtgcgcaaagctcaagcccttcaaccttttcagcaggagtgcaacgttcatggtaaacgccttcctcgacgaggacaggcttgagcgccgcgaagccaaaaacgattcccgacgcactccaacacgcgatcacggtgacagcaacctgggctgaaagttgttagctgtttgtcttacactgggctgaagaggacataccaattctctttgtggtggaatgtttgtacgctggtgttccagggcgcgtttctgcgaccgggatcgcgtcgctcggaggctggatgacatcgtagctgattttccggcgaatgggaacgaaatcgcagtcatcgactaggtctggttcaagttcgcgatcaataccgtcaatagcggaaacatgctgcaccagtgacattgctctgtgttgaacagacggggtgttgtgtggaggaaaagttggtttgatcggcaaaacttggttctttcccttttcctgacacctctgatttttgctctttacactcgaagcatactagctacattctcaagctcattacactgtggaaatatggttattgagacaaggtatgtagctgtttgtcagctctgattcgctcaggaatttgcctaaattgccactgtcgtcaatttcgtccaatcacaaaggatgtctaggtcaaattaaggtgagggcatccatggatcatcttgactttataattaaagtattatattcctacctcttacctcaggggctaacatctacataatatatactatactcacttaataatactccttctcaagcagccgtggcagcggatttctcctttttgattgacctccattccatcgtcagcgcggggacgatcatcagacaggacaccgccagggcgacaatgaacgaccgctggaggccatcattgtataacgccagaacctcgctcaacttggtagcagggacagcattcgacagacctgtcgccccagccgccataatcttggccacatcaatcccctgaatgtggggtaggtttgcaccgaggtaattctggaagagcgactgagcaacagcgataaagacagctccgccgagagactgcgcgaagaacatcagcgagacaccaatggcgacctcatccatagggagaatagtctgcgccgccatggagggctgctgcattcctgtgccgataccgatgccaaacaacacctggtatccaatccaggcggagtggttggtgtccaccttgaaggttgtcatcaaccctgcgcccgtcgacatgaacaccgccgcaataaacatccacgggacgtagtatcccgttgcggtgatgattgacccggagagtatggctccgacaacgagcgccagcaccatgggaattgtgtcgatgccggatttcacagctgatgtgccgcgcacgccttggaaccagagtgggagcgtgtacagcatagagattagtcctccaccgacacacagggaaaatactactccgctgatgatgctccgctggtttaatatgtgaggcggcactgttgcgtctttcttgagccggatctgcacaccgacaaaggcaatcatcagtgtccctgagatgacgaacagcgcgatgatgcgcccattgctccagggataggttataccgccccactgcagggcgagcaggaagcagatgacagagggcaggaatagcacactgcccaggggatcgaggcggaggatttgttgcttccaggtgcatggttggggcttgtgggggacggccaggaaaaggaacaagatgaccatggtgaaaccgccgatgggcaagttgatatagaagcaccaacgccatgtcacgttgtctgtgaacgcaccacccatcaaaggtccgatgattgaggaaataccaaaagtcgaccccatcagcccgacatacatgggccttttggccagcggcacgatctgtgcgattatcactgtcgcgccggaaaatatgccagctgatccaatcccggctatcgcacggccgacaatgaaggcatcagagttaggggcgccaccacagacggccgatccgacttcaaaaatgaggatcgcgatcaggaagatggtcttggtcgagtagaaggtgtacaccttgccccaagatagctgcgtggcgcaacttgtcagcagatatgcactcgcataccaactgaggtcgtctagggaattgaactggtttgcaatgcgaggaactgctgtagcaatgacggtgcgatcctatagtgttcaatgtcttgttagtatatatctacatgggcaatagagaatgcaacattcataccaaggcaaccaaaaacatagcgaacagaatagaaacaataatagctagcagccgggtccccgttggtaaatgagtctcatctttcttgacctccgagggcttctcggtggtagcttcctggtcgagctgcttttctatcgatcgaatcattgtataatacgacagtggttgaacttgaagcaagggtatctttgcaattgatctaaattaacaaatatgaatggaaaagggcagacttataaataattgattgtagttcatgatctcgggggggtgaagctgggttcggcgccgaataacatagtacgaaattcggttcggcgccgagctaagagtcttggctccttcttgcttgtagcttattctttcgccaatacaaccaacccttcatgctatccacacgctctttttcttctattaacaaaagtgtggcgtgacagtcatcgaaacatacaggaatgcaatgcatcgaaagagcttaagaactttcttctatttcattgtcgatatacctaataaagagtcactgccccgttaccacaactccaggaattcgtctgccactttagtgaggagtaagctctaaaaacctgtcactagcctagccaatgtcccattgatagactgatcgcttgccaatatctagtaagaagcataaagggtttgttcctgtctgacaccaagttgaatacaatctgattcgatcgcgatgatcgtcactcctgacaaatcgacgtgggggccgaactgacaagagctcgaggacttcgccacttgacttccccgcacagaagaacataggcgccccatttttatttctccttcggcggagtcctggtgcttgatggttgaatagtctctactagttgctcaacaacttcccgactgcaatcgtgaagctgacatgtccaactcaaaacccgaacgtggaagcaggggccgatatgctcgcttgctttgtcaaggctgcaggtccaggaaaatcaaatgtaatctgccagatataaacgagctgggtcctcttggctctccacaacccccggaaaagtcctgcgaacgttgccgcagcctcggtcttggatgcgttattgagcgttcgactttgggtcgtccatccttcaagcgcggtgaaaatgagtcaggtcggaagtcaaattctgcccactgtcattcagctacgcaaaatgaacaacctggcaactctctgatcaaggactactcgccctcggagtcgacgacgagtccagaaaccactcaagaaatacgtgcagtggctgacaagacggtgtttgagtctgtcattgaatttcaacacttttttgcctcggccttgggcaaagaccgaatatttggtgctacaattcctcggagtacttcaggctgcatgactcctctcccagagctggtgagccacgaaatagcgagcagtctcgacaaggagtaagcacctgccgttaccttgggatatcttgactgcttgtctaacatatgtcgtattttaagcctggcttggtataggttttttattcccggtctgccaagcttagtagacataagagaccgtctcaagggagacgacgaacttaatattggcaccaatttgctcttcgcattgctttgtctgatctcatgcgatacaacaggcaaatttgaccggcttcatccacgtttgaagtggaaccttcagctggctatttcatcctatgggcaagagtttatcttttcccctcccactcactgcgactctgttgttgtctgtattatcttggctgattacaggccaaccaccgtgggagtatctcaacatactgcacacagagcgatcaagtcgaccctatatctcaatatagctttcaaagtcgctgaaaaattagagatgctaccttcgcaactcaatctaagctttgcagatataccatccatgagtgatgaggaatttgaacatcgaattacagattctttgcaaggaatgaaaatcttcacccaggatatcattctagatggactattgtcaagaccagtccatcaactgcaagaagcgctggatcgcatggcaccccatatccacgtttatcaaaatgtcttcaggcatcgtccttgctcaccaaggattattttccagatacagtgggccacagcgagctatatgcttctagaatctttgaaagcaacaaaacagaactggaccaatccacaaagactatgtcatgttgtcgacgagactgaacaaaagtgtcttgaacagatcagattctgtgactgggcactgtcaaatacggctcagtcagggccgcccgaggaggtaagggctgctcgttctttgctggaatatcgattccatgcagtaataggacgatcatatggaattgcgcttcttcacatcatgatccttcggtccagagcctcaaacagcagcttctcaagtgattccgatataaatatccaggaagctagtcaaatgggcgccaaactctcggatgctatgagcaatacttctgatgatctcggcattcaaattgtgacattcatctcacgctttgggcgtcccttccccgatcggctactcgcagtgcttgaaatgttcatcaagggcacagatttaaaacttgatggcatacagtttcaagctccattccgggatatcgttctcgatatactcgccttttccagatccatcgtggagaataacagcatcaatgtcaagaacttaactggaaagatgagagaaaatgccgaccaccaagtcttggttcttgcagagtgtgctaaaagacttggtaacatggttgcctcgcctggaaaatcgattgaagctgcttttgctggcggttgcgtgtttgccgccannnnnnnnnnnnnnnnnnnnnnnnnnnnnnnnnnnnnnnnnnnnnnnnnnnnnnnnnnnnnnnnnnnnnnnnnnnnnnnnnnnnnnnnnnnnnnnnnnnnnnnnnnnnnnnnnnnnnnnnnnnnnnnnnnnnnnnnnnnnnnnnnnnnnnnnnnnnnnnnnnnnnnnnnnnnnnnnnnnnnnnnnnnnnnnnnnnnnnnnnnnnnnnnnnnnnnnnnnnnnnnnnnnngctgtttttgctggcggttgcgtgtttgccgccagcactaaagtcatgatggcattcattgatatcatgagagatctgaagaaagaaagcgatcttggaaaagctggcccggtgccgctaactgtgtctgatggctcagcagaagggccaagcatgagtacctttgaagataattccctagattcggggaatttgtggtctactgagccaataccaaattcttttagcgctgaagatttcgtttttgactggtccacgataatggattttgatgaaaatatgttgtacaatgacctgaattttgattttgcttcgtgttaaagcatttattggacaagatgtatataactctacgggtgcagaatataggggttgcctctaaagcaaagtgcatgaagagagcaagaagggaaagaagggaaaggaggaaaaacataatgacaatactcaacatagtagtacagatgattgttagttcgcttgacacaaaggtccaaataatgcaccgcccgtcacctcttcccagccttcattgcccacgcatcgccagcaccaaaacacaccctctgggtcgtacttcttcttgatcgacagaagttggtcatatctatcgccgaaccagtccttcctccagtccggatcatacgggtcggcctcattcagataagttcccgtcgcaggagccaaagctttcatggctgctaacttccttttagtgagttcctccttaactttttgaatttcctccgaacccgcatttgccggccacatatctattccttgtaacagaagataggctttcctccaagctggattcacagaggtatatggcacattgttgagaacttttccaccggcaacgatattcaggagcacagtgttgtttgcagtatgaaccccttctccgacctcggtggtcaaaatttgaagcaaatcatatagctgttgttctttgccggataaagaatctttggcgaagaatctcgatgccatgagtggttgattattacctgcggacgtgtggtgcgtcgacgcataccatgcggcccacgaaggatgagtagaccatttagatgataccaggtaatccgttccatttccaggaagcagatcatcaataatcactcggttcatcagatcttttgcgtgattgatcgcttcaattgaatcattcgcgaggaacttgatgaagggagcgctgtatacccaagattcatacttccgggtgaggaaagcagtaccggcgaacccttcatcaacaattgcaggatatttcgaggccattcgagccgtggcctgcaagactgcagaggtattgtggcccaaatccgcaatagtcaggtcatggtaaagggttggacgagtaggatacgtcttgatggtagctgatatgacaacaccatatgtacctccccctcctcctctgagggcagtaaagagatcggagttctgacatgcgttcgccgttacaagctctcctgacgcaaggacaactttgtattcaaggacttgatctgttgctagtccgaattcgtggctgagggaaccatgacctgctccctgaagaaatccgccaatgcatccgacggtcttgcgttgtgttagtgagattgcattgcttgagttttcattcaaactgatgtggacttacagggtcacctcctccaacaacgacatggcggtgtttagaggcgaaactgtagacatccttccacacatatccaccctggatagtgatcgcacttccagtccaattagatgggcagtttccttccgaataattgaatgtcttatgaaaatgaagcccgcctttgatatgctttatccagatcgacaaactgccgtatccttgcgatctatcatgattttcatcgtcagtcataagatacttatataaagattaaaagtccaccttaccgctgtgagatgtcatgcccagtattcttgataacgagtcgcacattgttctctttggcaaaccttatgccagcagcgacgtcatcggccttggtagccttgatggtatacgcgggagaagttcctagctcgcacaacggatacgcggctaccgaagcgttgattggggggcacgtatcaacgagtggatagctatatccgattggagattccgggatccagaattcatttgtccaatttgaagcaatgcgttgacattctttagcgctgtatccagggccgtgatagcatgctttggcgagaggctggttttgaagaagttttccttccaccgtagagttgagagaagtccatttcgaggctgatggccagcaatcgtctgctggtgtctatttcaacttggattagataatttgcagtatacagatccatcatcatagaataacatacgcatttgcatttagcaaagacggactgggctccagcaaggagaaagaggcttttgagaagcatgttcattggaatattcgttaaatgttttactgattactagcgagagaacgaccagccgtatttatatcaattatatattggttgctttacccttccgtgtgtggcttgaccttcaggcttcagttcacattgatgtaagcggaagcggaatcattgaatcaatgtaccgcaccagaattccatggacattgtggcagtgcttcgcaaattctcaatgcccaatactatgtcaacggaattacagcaaggcttatttcagtcgagtctcatatatcgcaaatttcatttgtaaactgagtgcgcaaatttatcgcgcaaatttattatccgatgaatgatcgtcgggtgttggcgccacctcgtcattcagatcagcgccctggccgcagacaaagtaacgcgatgactgcgatatgtgcgatatacagcgtcatttacgaagccagcctgataaaatgaggtttataccctatgcatacagttcacactttgtttctcggcctgtacccgagacaacactaggccatatatagctagctggaaattttaactacctataagtggccaataaattaccacttgtcctaatcaggactcgacttgtttcgtgtacgggccgataaagaaagcccgagtgtctatatttatcgagggatatcctgcattggtatacatatatacttcttgtgacgataggagtagtttagtgagttattggaagaaccctctctccggagaacgaagcagtccacgctttagataggaaggctatgcagtagctaagcatttatttccggacagaaaattccgctctgcagatacagaaatgcgcatgcacgcaacagagaaacttgaatgacgatcttcgcactcctgaccattattggctagcactggggcctacagactttggggattggggctaagcaatgcaaagtctggggctgaattaaggcccaaaaaatcaagacttttcagagggatcggcagtgcgccctagacatgtaagattttgagtaagattttgggtttacgggatagataaaaggtgggtgactcgggggtttccttttcttttcgcaatctatttcatttcgtcttttcacgaatccttatatctacttttgtcggctttagcgctcttcaaaatgggtcctttaaatccgagacaagcggccgctgggagctatggctgctctatacctgatcacattgaaaatggtgagcgataattgctacgcatggattaatacgccaactaacgttttgaatagttggtggcggaccatttgtgggaaatctctcattctaccacttcaacatgattgtttccggtgcctgcactatcatagtgctgttcttgactttcggtcttatgggacgccatgcgatgcgcatgagtaaccccgaagaacaaatcaagtaagtccaccagtaaggtcgagacagccttgcgatactaaaagcatatacaggatcatgcgaatcgtcaacatgattccctcctaccaagtcctgtccttcatctcgatctgcgttccaaactcctatatctatctacaaggcttcaccgaggtattccagggtattgctctatacgcctttctgatgttactctgcgagttcttggcccccacggaccggggtaaggtggaattcttctcttcgctcgagacgaagagacagtggcaaccaaagaagaagagaaacggtcttgcgttctttagtgtaagtaccctgaccattgaaacgcacactatcgaatgctgaccgaatcttccctttagttgacctggtggtctgtccttcaatatccaatcatcacctgtattacagctgtcgcacagctggtgacccagttgttgcacaggtactgcctttcaagcaaatcaccccacttcgctcatgtttgggtatggatttacccttccaatacgtccccatatacagtaaagagagactaacatagatgatagatcacagctgccacatctctgtcaacatcagtggccgtcaacgccatcattcaattctacatgaacatgaaggaacatatgaaagatcaccacccactcaccaagttgctggcattcaaactgattgtcggactggtcatattggaaaagatcatttttctcatcttggagagcgccaatgtccttcacaacaacgacacattgacctatgtcgacgtcatgataggtctaccagaaatgatcatctgcgtacagatggtcccgctatgcttgttggtcctttacgcttaccggacaaagccttacgaaatttccaacgcgtctcgcaccgtgatcctgcggcctcaagagtaccaggccatcgattccgatggcgacgaggaggtgttgacgagtggattccagaaacgctaccagggtggctggatgggactgcacgcatgggccgcttacttgaacccgctgggcttgctcatggatgtcatatccgctcatagaatgatctccaaagctcgggctctacaaagggcgcagatgaaggagcaagcccagaaggaggaggaaatgacaagatatgagaccggatatgatactgccgagggagcatgagttttcacattttattatcccagtgaagttacaggcgatctagactagattttatgcacgatgaatatgaatgcacatccgcgatgactactatctgaacttggtggttgtgaattgtgaattactgacagaaagcttgcattgacttctatttgtgcttggctaaagcattaggctttctcacaacagtagctgattaactatcagcttatttccgcataattgcgcgtggcggagccaaaagcacgacgatccaccgtactttagcgcaaggtggagagtttaggggcgaagctaagcccaaaaggggaatccagtagcgccaagactttttcaaaagagtggggcatcgcgatcggcagagcctctggcccggtccctcgtggcttccttccctatctttttgccctactcgtagcgtagatggtcacgtatggtactcgtgttgacatgcctttcctgaattatttgatcgttcctgtctcttcattgccatcttatcaatttagctactttcaacccccaaaactccatcaccatggttgaggtctacgggttctgcgacccaacctttcagtcgcaagtagctgctgggtcattccatcgggtatagcttcttagcagaggctacaaattttgtcacactttcctagactacatgacctcattgtgtagctcaactagtcgactgacgcgggattccactcattctctgacatctagagtgatatttccaaaatttcggttcaccttcgttgtagattgtggaatttgattcggcgcgcgcaattaattgcgcgctagctttagaagatggcgggggcggggttggtccataagcgcaactaattgcgctttacctcgtttacatatttaggagactgtttgcacatctattttctgtttgcatgagcttgatttcttccttttcgtcccaaagataaacctcttcttcaactcggattggccgacaccatggagcccttcaaagacaagataattcctggccctggagatctccccaacgtccgtgcagatgcccaacgcgttttccaggtcctcgagtcaggaggtgtggttattctaccgaccgaagtgggctacggactgatggccacttctgcggaggccattgaccgtgccttcgccgttcaccttcgttgtggattgtggaatttgattcggcgcgcgcaattaattgcgcgctagctttagaagatggcgggggcggggttggtccataagcgcaactaattgcgctttacctcgtttacatatttaggagactgtttgcacatctattttctgtttgcatgagcttgatttcttccttttcgtcccaaagataaacctcttcttcaactcggattggccgacaccatggagcccttcaaagacaagataattcctggccctggagatctccccaacgtccgtgcagatgcccaacgcgttttccaggtcctcgagtcaggaggtgtggttattctaccgaccgaagtgggctacggactgatggccacttctgcggaggccattgaccgtgccttcgccgcgaagcgacgccggccaggtcacgctcagggtctatatggcacacatgaattgcaccgggaacttcacatcctggacgaccagcggtttgaaatgacacgtgtgctagtcgaagacctagacatgagcttcatggctgttgggccatgccgcaacggtcatcatcttcttcgggctttatccccacaaaccctctctaaggtcacaaaggacggcactatcgctatgttcatcagctgcagttcacttctgagagagatttgcagactgaatgctacatcaggccagctcatggtaggctctagtgcaaacgtgtcaggtggtgggcagaaattccgtgtcgaagatattgaggatgaactcaaggaggcggcggatttgattgtcgattatggtctgcaacgctatcatgtatatggacgaccttctctcatcatggattttgaccagatgaagattttgcgaatggggtcatgttatgaactgttccgcgagcgcatgcggaagttttggggggtcgacttgcctgaggaccctgattatcgtgcttgagacttttgtttaaggcgaagccgaagactatggaagacattgttcattcctcgactagacttttgtatgcctttcctaaatgtcttcgcctacatttgataggtaccttgtacttcacaacctagttattatttagtctagctcatcctctctagtgcacattacaactcccaaatactcaaccaagcgctattaggtgatgaacaagcaaacagaataaacgaaataccaaaccaaagtcccaaatcaagtgtgactccccgaactttccgattccgaatcccactcgtcatcccctccagcactttcctcctttgcagcaatcacaatccacaagattttattggcctccttcgtcttcttcttttcctgcctctcctgtctccttgtagtcccccgatctcctctcctccctgacctccgatcttgcctagcctgatcctttatcatcttctcattctgcttctgttcggccttgctagcttcttttgcaccccatttcttccaaaatccatcaggcattgttggttccttaacattattgaaggaaagtgacataactcgatttcccaacaaactcatgcgctgcataatggggtggttgttactttcagaagcatcctggtactgctgacgaacgaagacattttcttgatcacccaagccaacatattcaagcatcttatccgtcttgcacatttggacatgcaaacccttgggatggaaaagctcctcgttcgccttggctaggtacttcttcgtgcgcactttggttgtaactgatgagctgaccccagctaccacgttgacactcacactgaccatctgcacaatcatggagggggccatgccgccgacattggcggcgttgttggcggcttgaagggctgggttcgctaggaacgcttcgtttagttcatcgatgaaaacgataagttcatcggacgagatttggtgctctagttctggtacgcggacgcgagcgaatgggctcatgttctcgccgttgaatcttctatgacttatctctgggtaagtgatacattggttagatttggccactaattcacggataggctttatactaacgaggtataacacagggccgagatacgcttggaagctggggtgggagctgaagtagctgtgttggggggtagggttgactttgctgggctactaattcgttgccagcatagagttcactcggcggaagtgcaggtggttgctgtctcgcatactgggcttctaacacgttgccagcgtagagttcgctcggcggttgctgtctcgcatactgggcttctaattcgttgggagcgtagagttcgctcggcggttgctgtctcacatactgggcttctagttcgttgccagcgtagagttcactcggcggttgctgtcgcacatactgggcttctaattcgttgggagcgtagagttcactcggcggttgctgtctcacatactgggcttctagttcgttgccagcgtagagttcactcggcggttgctgccgcacatacaactcgttgggagcgtagagttcgctcggtggaagtgtaggtggctgctgacccacatactgctgtggcgggccgtacatttgcctgggattgtatgattcttgcggccactgcggctgtggcgcgccatgctgctgagtttggctgtattgttgttgctggggatgtccgtactggtcttgccctggactgtactgttcgggtggataaccctgccttcgttcacggtatcgagatcggccacccgattgtgcgtgtcgagggtcttgtgcaggagctctttttcgggcctctctcctggctctgagcatgacttaatgcttttgaagaaagaattcggatgaaagtgcgttagctaatgttcaacaataattcaaattgatttgtagatgacgttgaaaagaaaaaaaagccccctccaacatgtcatgccgtgggttcctccttattaacaaataacactataataccacagtatccgcaactcaaaacttccccaaagaatagaaccttcgaccaatgacctgcgccaaaacacgaaatcgcgcatcccactctgcgcagtaacccaaaaggaaggcttatttccgcataaatgcgcgtggcggagtcaaaacacgacgatctcaccgcacttccctacctgcattggctagcgtaaagcggacagctttgggggctaaaatgtgaagcatagcctggaatctggtgtggccaagaattttagctgaaggagagtagctaattgcgtcgctccgcaattaaatcataacctcgtgtgtgtatgtcacatgaccgttctttttcctatgtacaggctccgaaatcattagaaatcaacgcggtgaaggattagtcggccaactctggcagaataatccaatcggcagaataaatatagactaggcccaatctagctagactgttaatatatagtcacgtgggcctctcgggcatgtcccaatggtccctacacttacgtagcattagaagtaagagtcagtcgttttgctctgcaacgatatctgggcggccgcaggctatccagattactagtatgtcatattccagggctgaccgtcgattttggaatcaataaaccttctcgttagaataaattaatgcccgaggtccaaggcagaatcaggcagaatcaggcagcagggagtggtcatatccaaaggggggggtggctgtatcaatgccccaagaacaatggtactccgtagccacttacaatggcattaacggttccatgggtcataaagaggaacaaggcacacgtaaataacaacaaacaccggccttccttatttgaggagcaaaaaagaacatcaccttcatctgcagcgtttgagctcatataagatatctgaataaggtcagatgaaagaaagaaaaaagaaatacaacttctcaaattattctatgctgtagatgccaagagttaatatataaatgccatgttccagtcgtcgacggatgacggatatgacgtatggaggcatgtgccaatgacgtagccctagcgacccatctacaggttatatgtcaactatgtgccatggctgaccacttttcatgaggaattttgcatagtccttggactgactcgtttgtccttgctatttgagacgggaacaatctgcaagaagccgaattgccggaacaatcaaacacttcatccgttcgaaacccacaaataaaagcatggccaacatatcgattagtgcccctggcctgagcagcggcgggtttctttacaacaatggcaacaataatgcgcgactatgcatcacagccgaaaccgaagatttcgatatcgagatcatcaagaactggcaggaggaaggattcgacgtcctatacctcccttataacggcggaggaaaagactacgctcgtcggttgcagtctgtaaaggacggactcggtgtaggcgaaaactacgccgtggttggtatgcacagaacttctctgaacatataaactccgagtgacaaactgaccaacccgattcctagcctacggcgacgctgcggactactgtctcgggtactatatcaattccattaacgccagtcgactctgcgccctggtcgcgtattaccccagtctaatccctgatacgcgatctcggttcccactctcactccaggtcctcgtgcacttggcgggcaagactgtggacgtacttgttcagcctgtcgcacttggtttgcaagggaagaaacgccgccagacacggccgatcaacgctggtatcgggactggagagcgtttggatttagggtacccggcgtttacgtatgataatgccgtgcccggatttgcggaaacagatctggaggaatacgatcgtctgtcggcggagctagcttggtcgcggactttgaaggtcctgcggaaggggtattccagggatccggattacgagcagcggtatgagcaacatgtggaaggtaagtttaaatcgcaaaaccgttgagccatggcggactaatactttgttagccaagtttttctcgtcgaacgtcaagaaaaccatggatggttacgttcaacacaaaacccctagtgtcacctacacgccgacaatcagcggcggcatcgggaaaaaatccttgcgccatttctatgaacattacttcatcggcaaattgcccccgtccatgcgcctgcgactgctatctcgtaccacaggatccgaccgcatcgtagatgagctgtacgtcagctacgagcacacacaggaggttccatggatgctaccgggcgtcccggcgacaaacaagcgagtcgagatcatcctcgtgagcattgtcagtttgcgcggggggcgtctttactccgagcacgtgtactgggaccaagccagcgtgctcgtccaagttggtcttttggacccaaagctgctgccaaacggagtccagggtgtcgaccgactgcccgttgttgggcgcgaagctgcccgtcgcatcctccatgaggatacggagcttgaacaggaagattaccataacaagatgatccgtcgtgcacgtgcccgcgcgagaaggagcttgaatcagagctcccgcctgtcccaggctggcgatgagtctgccgctgacctgaagagtgaggcggagcagtcattgcctgacaggagtcgggataagggcaagtcggttcagaaaaccaagcctgcaagtctgcagcgagcggccatggaagcggctgagcacgggggtgatgatgacgctaatacggagacggagactagtgtcaaggctaggtctgaggctgacaatcaggctgcctatgtcgaggatggggaaaatgatagtgctgagaatgggtctaagcagacatgacttctcactactacttccctttgtcatgataaccacgaagacattaccatagccttttctctgcctccagagattgaaggattttgttgggaatgttcttccgattttttaagcgactgtattttgattatcagtgatgttgtacatgtcgatctcttctgtttagcattaatgattatcactactgtggatgcgacgatgaatatgatttgtatgtttgaacagatattgcaacaattgagttgaaaattgaagctctgagataatgaagtacagcgccatcgaaggcaccaaagaaaccattatatatagtgtagcatactatcattagcaatcaatctgacttctgttgatcactccttttctcttagtcacatagtcagatacgcgtaactagttatcatatggaatatatatacacggattcatcgcggatactccaaaggaaatcatggacaaaaacaaagcctagttataagcatcgagtcatccccgaaaaatgttccaagtggctcaaagacatatttcacccaatatcacctcggctctagttaaatgatacggttcctgccattcacagttccagttcggtcgcatgtcctcgctggctttcgaaggtgcagaggagccagggttcaaatttaatgaatttcgggtagaatccatcatatcaccatggcatgagaagcataatatgagagaatgcgaaacataatggcacctgaaggtattaaatgacacaaaggaatacgtgacgagactttacaaggcataaaagacaaaaaggttgatgcgaatagagtttaccaagttcatcggacaaagtggggcaaagtgggacttagagatagggaccccatcattatggcctagtggtaaaatacgctgtattctttcctacctgtacgtcaagatattgtttttgtacgtgtacctaaatacaccaactggaaggtgatagatgagaagaagttcagggttaagattagaaactaagcaatagttagccaattgactaactcccgtttttctcaagttcaaatagacaaaaccacgtaaggcagggtctcatcaacgatccgtgggtgcaacttaaaaatataacctccacaggcaagtgtcccattcaactactgattatcgatttgatgatgccgaaaattgctgacctctcgccgacaacggtgttaccgataccaatcaatcttccccgcgccttaaagccagcaacgagtcatgaacaaaatcaacggatctgtttttcagaagccaaaagcacaagacgataagggtctaaaagagtaagcaaagtctttgttggttagatttctgggtgtcctaaggacgttcgttcaactgcttaccttcatcttgtaaaatgagacgagggatatggagtcatccactcacacattgtagaaggcagcgttgatatacttcaaacaggccctaaaacaaggactaatcaaaaatccttgttctgatttatgggcgtactggcctcgtgtttagaaacttactattgcgacattttgtctaccgagacgcctgatgtctagagccaaatataccgaatgaaggaataactaaattccctcgacacctcaatgctgacctttaatccagaaggcagttcaacatcgatatagatatatagaggcctcaaattgaaaagagggtatgagagctgcaggtcaggcttactaattcgaagcagcgcgttgatggcctgcatatgggggtaatcggtataatacgtatggaagaaggccatgagttgtaagaaagaaataatatttgctcttggtcggacatatctactctgaaagtttcgatagaacctttgctgtattagtatgttcatgaaactagttatagccagatacagatggacctgggctcccagaaactagtaatcgcgtgctctcaattctaacattacctacaatccatccattagtataactttaataaagggaagattggagggaaatcaccaagttccaagagggtgttttaaaattcagagggttagtcgattaggccctgcggtataagctctagagggcaggcgggatgctctacattcttctttttgacacatcgtgacttctcctaagtcctgctttttattctctctttaagaagagtcagtaacaatacattcgacaagtggaagatataatttatgttattttgctgagcgaaacgaagcaaactattatagtcgttcaggcaagggaatatactaggcctgatttttgagatttacgtaatagaagtagcagtcctaacggatcaaacattacaaaaaggactattcttcctcaaattttctgatctaatacacagacacttttcagaccaaacttcttctcatcatccgataaacacaaagcttctagcacggacaaggcctctgccgcaaggtatttgttctcccaggtcttttgaaaacagaataaccaacaagatcagatcacgtcaacatgtgcaagagaacctacagtagaaggaagcgggcttatgaaaattatcataacatacctggccatctggtctctgatggatgcaacacctacggggtagagactggcagaaactatagtattctcggtggtaccacgcaggttccttgcgattactgcaaggccaaaggcctttaggcccaaacagccgatagtaagtggtacgaggtcgcactaggtgggcctctgccatgatctacttttaagtatccttgtcagttctccttgtgatgcttcaaaatttcttataatctgaagacccttctagaattccttggcaaccttgaccgttcgtgaatattgcatagcgaagtatcgacaattcatgacctatgtagtagtgatgagctactacatgctgagttgggataacgcggcagtcattctttctgattgttcttgtgccgttattgagtttgtgttgttcttttggaaggtccgtgcccgcctcataagtgaggttggcgcggggatctactctattatctaccacgtcgcgccaaccattgtggtgaaaattggtgaaaactgttcatgccgacctgacccccgaagaaaaggaaaccctagaggaggacattttgatcaagaaatcgcgttcttcaagggtcttgataagcttcaagatcgatgtccagatattgttatatgctttctcatgctccctgactatctttttctaccatattgcacgcatgggccactcttcgctcgcttttttcactaccaggagcgggagccaacaataaatcactgggtagggcgagttatcagggtcaaggagtacgaggatcctgctctcgtcgctcggtagatataacaactcacctccgctcttgagtatgtagagaaaataggcttctatcacaatgttctacattcaggcaactgtcttctagacagtaacttgaacttaaaactaactgattttagctgtactaccactattagacaactgcttaaaaatttacatactccgtaggccataaaaatacttgctagaccgttgaaaggcacatacagtctttattctaccagaactgaacagtttacagtcgggaaacttctatacctcatataatatggttataaaccatattataacattgacaacagggaatgggttaacagtagagggtctgaccgatttaggaatatagagtttccagaacttaatcgcaatcaagttcttaataggcttatttctacttattggctcaatatctatcctacaatagccttcgtagcgtactactttaagcgcaagacaaaggatatggtattgagtctagaatacatccccattgactctgcaaaggagacaaaggcctatgaagcattgattcgcaaaggcttgctgggacctgagttagctctccgcttccagtcggcctagagaatatacctacatgcttttgtacagagaagtatgtttatttggcaatcttttctacaaagaaggttctggatctggtcctggtgattggttgctgatactttcaggcatactttgaggctttgactgtcctcatgcaattgaaagacttctctttgttcccttttgtagtgtttaggcctaccttcgtcttcatgaatatggcagtaattagtccgtcatcatcgattaatctgacttctgttgattttattctgcaagtattgttcattacgttgatcgcgggcttgctaacttactaagatatcagccagtgatgttattgccaaccacagagattcttcactgtactataagataactacgaatacgaccatgatatcactagtatttttgaacgtcttaagaaagagtttttcgtaatccaaaaatcaatgtcaaatgccaagacgctagccctatccagacccacataataacgttaagctaaagaaaaccttccacggtaccttttccgttttaaggttaaaagtttgtttcaggttcatttctcatgccacacttctaatatcgaccatctccttgtgactcgtctgagagtcaatatcacgtgtagccgatcggggagtcaccaatgtcttcggagagaagatgttgaaggtgaccatagtcaagaacatcagagcagcatcaaagacatacaagtacacctctgtcgacatgatcggaccatttgtacccgtaatatactcaatggcacggaagatagaccgaatcatgataaacagactagccgtgtatagcacaaacaaacacttcatccacggcaccgtggtggcggatgtagaagtcccatcacgggctttccaaagccggtaatggaacacaccagcagtcacgacgaagaatccgaagaacgcaatttggataaaaagaccggcaatgatgatgtcttgtcctagagcaagcttagactgggtctttgcggaagagaggaagccgccgccagcacactgagcgaggaaggagacaacgtctccacagacaaatattttggtcagccagttgactcggataagagagagcttttcatgtccggtggagataattgagcggcccaggaccatgtagatggatgcggcgaagaaggctggtgcgagaaggagcaagagtgattgcatgatatatgggggtgttgtccaattggggctttctcgcgagttaagatagcgaccgaggtagccgatagcttcaactataagtaagttagctttatatctccgttctcgaataagatatatactgacagattcctccgataatgaaaggaatgaagaaccatgatcgactccgtatcatttgaaaaatgtgcaccagggtggtcaatccgaagagaacaacaaagataattgctgcaactcccgatgggttatagttgtagagagtgtaggtggattcgttggccattgctatggtttgaattgagtaaaggagaagacgtaattgaaaagtaagaatcgaatctaaaagcaatgttgactatgaagatgtattgattgccggccggacgctttcatatttatataacaattgcattgctgtgaattttctgcgagatctagtgctgagcccgaaaatctattctgggttcagatttgggttggaatccgagaagatttagacagccttgtttctagaagcttattgtgggtgtatatcatgattgtggcttgggacgaagttatatattctaggctgccgattaattttgctccctacttcgtcactcttgtagacatgtcaatctcgaaactgtttgaagatcaaagatccgaacccgaaagtccgaataagagtaaatctcggtctcttattggttgtaggaagcctcgtattcgtaactttatctctcgtattcgggtccgtgttattatgtagcctggccatctgcaggtgttgttcgatgaaaaagataaacttaagattactcaagatctatatcccaagtttaacatgtcaattgttctgcctgaacaagaaatagccctgttcaactcatgtggatcatattgagatgatccaaaacgttgatccaaaaacgagcccgtgtgatcatcatggagaacaccaaaaagaattagtctcaccgtggaccggagtgaaactaccctggtcatgcgtaccatggaagcagaaaactgaaggattgcaaaactacaagaaaggaccgccccctgcgattttctgagaagcatcaatcacagatttgattctgacagtcaaaatgcagcttctccttccctttgtcgggctatccctttcgggtcttgcatatgccaattcgagcagcgcgagcgcctcggcgactgtaacgggcttcctctccacttcttctggtactcttcaggtccccaagggagcttcatgtgcttgcgagaagctttctcggtctatgccgaaaagcataatcctccccggtgcgacaaactacacgactcagacagtcgataattactgggatattcgcgcgaatctttctcctgcgtgtgtcttcgtgcccaatactgctgctgaagtgtcgcaagcggtcaaaatcatcggtgcctgtgatgcgcagtttgctgttcgtggcggaggccacatgaacgtaagcttctatcgaatagaaactatgaaataatactaactctctactctacaacagtatcctggagcgaacaacatcgatgcgggagttctgattgctttatcgaatctgaactcgatcactgtgaagagtaacaccgtggaggttggccctggactcaattggtacgaggtggactcagcacttgagcctcatggccgtgtctgcatcggtggccgtatgaagaccattggtgttcccggactcagtcttatcggtggcttccactacttcaacaacaagtacggctacgccatggacaatgtggtcacatacgatatcgttcttggaaatggaactcagattactgtcaacaagactttgcacagcgatctcttctgggccttgaagggtggtgcaaacaactttggaatcgtgactcggttcgagttgaagacttacgatattcctaagatcagcacaactattcaagttttcaacgagacacacattcccgactatatctctgctgtctgcgaggcggctaagctggacgatgaagatcccattgcggcaggcatgatcgccactatcacctacaatgcgaccaccaaggtggcacagggctctgtcctcggtgttcaggagggtgtcagcagccccccatctcaattcgccaactttaccaaaattccagcaacccaaagaattaacaatgtcactactataaagccatgggttgaggtccttgactcccctaagcagatgatgcggtatgtaatctcgcctgtattgcaattttcactttactgattacttagtgtccaattctctcacaagacgatgaaacccgacgcggaggttctttattcgatttacaaggcttggaaagccgcagtcgacaagatcgccgatgtccagggtctttacccgacttttgtcatgaatgtcatttccccgacttcagtccgcgtggccaagaccaacggtgttggtaacgtttggggtctcgaagaagaacctcttattagtaagtccttccaaacttagttcggttgcgcttcttaggcttaccattactgtacagtttggcaactcagtaccggctgggacttagcccaggatgatattcgcatggaagcttgggcacgtcaattagttgagcaccttcacggtatcaacaaagagctaggtcttgcttctgagttcatctacatgggtgatgctggtgagtggcaagatccttatgcgggtttccccagtgagaacgtcgctcgcatgagaaagatcaggtcttcttatgatcctgcaggagttttctccatccttagctggggtggtttcaaattgggtctgtaattaaacctaagttgtcagcttttggtagatctggcgatacgtccccttaagtgacattcatatttatcgtgtttatagaatctctatagaatcaacccacttcgtaaccatgagatcttggttttttgatgacatagtcgcgacgtcaacagcgagggagttaaactactagcatcaacaatatatcaagcgaggctgtcagagccgataaaattctcgcggaatgatcaccggccaacctcatacattattgtcaccaattatttttgacctgtcatctatctggacagaacgcacgaataatgtggcagtatttatagcttccaagcatttccaagcctttctagaggcgaacagccgttcaatggaatgtatagggagtgcccacataccacacgcgatcctagatcaacatcatatggacccttcgggaatggaatgtgcgatcagacaaccgattgagtgaacatgggattttttgacacttgccagcccctgagtatgacgcagaagttgcattcgaattttagatacgtttcatgttcagcatcatagccattcttccccgccatcccattatcgcggtacaatcgtataagaagaatttgatagggcgcactaggtatataagagcagtagatgcgcatcttgctgtctacgctttgcaatcacacagttcaatttgatcatcaaactataacttcactgacattgaatcttagcaaccatgcattccctcgccacctcattcatctccttatccctactatcaggcgcagtccatgcccaaagcatcgctcgtgtctggacacacttctacccaaactgccctggcgagacattcagcaagctggacacatacgaagactaccaagaatccggcccatcccaagatatcaccttggacagctgcaaaagcttccctgtcccctcctacgagcacaatctcgtcagcgctatctctgttgacgccgagctcctcacccacaaccacgacctccccttcctagaaggcggcagcggctgcaacatcagcgtgcacgaggtcccaggctgcatcgacccgcccctaatcaacaaagagatccgaaatggcgtcgaagtcagccattgtgtgccgcgccagttagtcgcttatagccaggtctgggtgaattttgtctgcggcagcgatagccctctccacaacgagaacattccccagacgacagaagagaacaagcaagcagacaccaagcagtccatgcctactgctgcgcccgatgcgcctgtgcgtactgagaaacatacttccgtcgaggatatcaataatatccagacgcctgggtcgaactcggattcgtggcgtacgtcccaggttgtgaataaccagcgcgagccggcgcaggagagccgtgttaatatggccggtcatgtgcagagtgagcagatcgttcatcagatgttggagttgttgaagaacaggacttcgcatatcgtcactggcaagcatcatgctactcacttgaatgttacactgcatcacaatggcactaccccaggaaaccacactgtgatgtcacgtcggcgtctatctgttttgcgagatcgggctggtcgttttgtttgaatttgttttgggacgtctgtctgagcgtttgatttatgtttgatgaattgcaatcatgtgtgtataccgatcaattaaaagtctactgtgtatgtgaaaattgcgcaattccctaacccataatactacataatagtggacatagagaatggatgcgatattcttactcagaactcaactcaaagtagtgtaaaacaaaagcttcaataggtatggccgaagcaaagagtctacaggattgtatatcatttctggtctactgaccaaacgaagtgatattttgtgtcaatggtagacacacatcagactttacaacagcaagaccttttacggtcattccgacatgggtttagcaaatttaccaacgcgtagtcatgatcccaagttaatattctaacttgtctcttcgtcggtatctgtagccgcctgcttccgactggcagcctccttaccagcaaagctgaacaacatgcccagatcatagatcactttcaagcatccagcaataatgaaggatacaccgaaatggccattgcgcgacaagatacccgtcaacaggggacccatgctctgcgcggtagtcttcacaacattcaccgcgcccatgatagcagtgcgatttttcgccggcagagccgcggcaaggaatgcggagcgaggcgccacatccatattctgggagcaggctcgcagaaccaagaaggtcagtgccagaggcaggctagatgggacggagatgagagccaggcagattgccgacggcaaatgagtgaataccatggtcttccaaatgttagaagtcgctcagctttcccgagtgaagaatatcttacttttacattaccaattcgtttggcgagggacgaggcaatcagcatggatgctgcggagatgatgtttgtggtgaagaagatagtgccgagttcaccttcaggcagattaaacttgcccctgaagaagtaggtcatccaggagctgagaaattagcatcgtagccgacaagagttgggattacactcacagtgaagctaatccagatgcgaacgagtccactccaaataggatgaagagacggataaccagcgaccacaggtccttctcgatagacgggaacagccacttcttcctcgtggccggctcgatatcccgcccgactgcttctaccagcagcggttgggtttcagagatctgctcctgcggctcttctttctggacctcgaccttttcacttaagcccaaagtgaagattaacttaacgacgccaacgccggcatagacgaagaaaatgatgcgacaggcgggaatgaattcccatccgtggattgactccagagaattgatgatccaaccacagacaagcattcccatggccgagccagcagttccaatcaaggaataccaagcaaagacatcactcaaaagctcatgaggtgtgagatgagccaaagtggattcctccacggcgcggaacggaccgatttcatttccactaagaaattagctgagataaaaatagaaagagaaaaaagggtcgaaccttggactaatgacacccaagactgcagcggccagtagaacccagaaattcccgaacagcgcgaaaatgactccgctaccagccatgagaattgatccgagcgacaacaccgccttgcgacccatagcatcagcatacagagtgaggaagaagctaatcacaacatctccgatcagcgtgagcgtcataaacaagccaatgcgatcatccgaaattcccatggccgacagatacgatgccagaatcaaggtcgagccgccatacgcgaagaggcgcacgaagcgttgggcgcagagaagcttcacgtcgagcgatgaccgccacatagtggttaggcccagctcttcgaggacatggcccatgtaacgcgccggtcgcgattgattctccattgtttgatggttgaaggaagaaagttgaaacaaccacgttttaactccgaatctcggactcggcgttcctgccggagctaagctttcttaggagagagagcctaaaagggctgaagaaatatattaactcttttgaatataaacaaaattattatgtacaaaggatattctcaatcactgctcagtcttgggaggccatttcactcgtcgttccgcccgcacatacaagttggtaggacggatcaactggaacatgggatcatactcgactgccccatcattctctttcgtgaacttgtaccggtataacaacttgggcaagaacactttgacttcctgtaaggcaaagttgaacccaatgcacatgcgcggtccggcagcgaaggggatatacgcagtcttatgacggttcttgacctccgctgtatcccaacgatccgggtcaaaccgtgctgggttagaccagactgctggattgttgtgtatgtggtgaagggcggggatgatgatggattcttcggagagcttgtatccgcctgggagaatcatgtcgactttggctgtgcgcgcaggctggtatgaggggttatgacggcgctgggtttctttgatgaacttgtccaagaatgccagacggtccgtcagatctgcggtcattggggtatcggcgtcgatgtcgttgtcaatcaattcctgtaggagtctctcctgcatgccgggatagctgactaccgaataaagcagccacgatagcaatgagctggtagttgtgaaaccagcgcccgtggctaccactagggcctccatcagactggtcttaggcaatttctcgcccttgttatcggttgcgcgaataatataatctgcctaggcgttagctcaagccttgcaacttctagtcattcaacttaccaatcatgttggaggcctgcaatgcagcatcctgcaacgggagatcttcgatgccattacgagaggcattttgaatagactcgttgaccatctcaataatacgatagcgagcgtcccgtagacgttgcgggtcaccgaaaggcaacttggcgtaccaatcaccacgggcggtcaccttcttgttcagctccaaagactcagcaattcggtagaccagttcgtggggtggtgcatccacggcagagaaatgcttgaagtccataccgagaaccagctttcccacggcctgcgcaccgagcttgagcatatatgggtagacgttccaagcctcgccgcgctcgtctagctcgtcgaacacattgaatgagtcctcgacggttgcttgcatagtgggagcgtagtgacgcactgctttcggacccagggctggcgggaggaacttgtgtgctgcacgccattcaggtgtatcggtgtcacccaaaaacacaccggcctgttggttcttgatcgggtacaaagggtgtgcctcgttgatttttttggtgaagaaatcagattctgcaaaaacaattgcggatagcgcggggtcattggtgtggtagactgtccggcccatgttggtggtttgaatgataggtccatattgttcgaatagacgctggtggtttcccaagtgatcggggtaaatctcgaagaagtttcccacgaatggcagtcccttgggaccgggaatctcccgtactgccttaccatctattgagatggcgatgggcccttcgttggtaaggatctcagagggggtggacaagatcgaaacctctgactgaaatccgatgcctaacttgagagttaggatgataccagaggcgacgcgataaatgcttaccacttggctcaacgatggcaaattgaccagcaataaggtgctgaagttcttcgtagtcgactgttgtctctacctcgattgggcgagctgaggtgatagcctcgcccaacaagtggaaatttttggcaaccatcgtgaaatgggaatgagaataataacgtgttctttctctctggaagggccctcctcacatttataaggatcttattatctgggccatttgaaactgcatagttgactccactattcatgaaagcgcatcccgactcattttcatgtcataatgaagcagatgcatatctctgcgagcctcggttcaaaatatttctcaaattaggatccacagtatcatcagattgcaaaaataggagaatacaacatagcgcggacgttatttcggactcgctgtgccgatggcactggcgcgaaatgtgccgtctcaaacggccccaccgtcaagatagaggttttttttaattatttttcttcaagatgccgaggcattttcaatccctccttgctggtaggctcgttttatgcaaataccggaagtgctaagtgggctattgtgataattccatgttccagtacggagtcctcgtcgtgatattaaattaagactccgtcctttttggtttttgcaaaatcattcattcacaatgtccgttccagaaacaaaagagctcaaggtcgagctgccagagtatacattgaaagatgtggcagcacataacaccaagggtgatacctggatggtgatccacggacaaggtaacttccccttaaataatcaaaaagacggtgctaacattacgacagtctttgacctcacaaaatatctgcatgatcacccaggtggtccagaggttctcctcgaggtagccggtactgatgccacagcagactatgaggatgttgggcattctgaagacgcccgcgagatcatgcagcccttcctggtgggcactttgaaggatgctcatcagtacgtccagcctaagacagtgcgtgtggtctcccaaaaagcacctgaagtggccaattcctcatcgtcgaccatcaaaacgatcgctttcactttgggtggactggccccagtcttttacctcatcagccaaagaaacaatctcacaaagagcctgggagccatctcccacttgatccctcacccactgaagaacctacgactacctcacgggggcttcatcaacggcttcttggccgcttctgctatctccacagtcctgggtgtaatggtagcgcgacaggccagcagattcaccaagatcgactccgggttcatgcggttcccacctcataagaagtcaaagaaggtgcttcgtgtcgatccgcacctggcacgcggcttcctcgacccgcaacattatcaacgcctgcatctcgttgaaaagaccgaactagcaacgaatgtctaccgtttcgtctttgccctgccaaccgccacaggtattttgggtctacccattggccaacacgtctccatcagagccgttgtcgacggagcgagtattactcgctcatacacccctacctctaacaacctcgaccggggccgcattgaactcgtgatcaaatgctatcccgacggtttattgagcgggaagtatctggccggcttgactgtcggcgaagaagtcgaattccgcgggcccaagggctctatgcgttatacgcaaggtctttgtcgcaagatcggcatggtggccggcggcacaggcatcacacccatgttccagcttatccgggcgatttgcgagaatgacaccgacacgacggaggttagtctggtttatgcgaaccgcagcgagtctgacattctcttgcgcgaagagcttgaacgcttcgcgcgccaatacccgaagaacttcaagctgtggtatatgctagactctgcgcccgagggctggacctatggatcgggatacgtggaccaggcagttctggcaaagcagctccctgcgccttcgccggacactaaggtgatgctatgtgggccgcccggaatggtcaatgccactaagaagaatttggttgcgttgggctttacaaagccaggggtggtggggaagatgaccgatcaaatattttgtttctagaaaattgcctaatatagtaatagccgaggtttatagagaattgagtcaagtgttaaattattgatcacaacttacgacccgtccgacggccctgttgccgaatgcgttcgggtgtccgaagagggcaggtctccgagagatcgccgaaactccactcgccgaagtgctgattcccgagacgttgactggctgaatggttgaagcttatcttccaggaaacactccataatactagtataaattatgtacacaagactatgttctccctcccttcacttcgtatcatctgtcttcgttcctttgcgtttgcttcgacgccggtgagatctccggcgcttcttccttggtttctgtttctcccgttctcgaatcatgaagcgaacccttcggcctaatcttccttctcttgtctcgaacccagtcttcaagttcatttctgttgagattctcacaagaggtgagatgttcaacttggtatttttcgagcctgagtatcgaggaagatcagacgatatagtaaccgtcttctttttcttcgacagttgatcgtcagtaggaggatctggaggtgtagggtcttccgtatcaggtagaactttggcggttcgctttgtcgatgcccgggactgcaaacgacatagataaagatagtataagagcagtagaaagactgtagcgccgaggatagaccccgctattgcacctttgctttcatctgacagtccattgcttttggtcgagtttatttgctcgggcgcaggagttgctgctatattgaccacctcgatgacagtcgtgaatggagtggtcaccgtcaatgtcaccaggttcgacgttggccatgacttggtgttccccagagtaatgactgacacgaaagtggtgtctgcttcgattactgtctgggtgacctcgcgaatcgcaggcgccattgcccggcaacaaattgaactgacatgatgggtttaagtgtcagtgacagcatcacttatttcgcgccacaaacacgtagggtatgcacgagcgggtcaaaacggtcttctagtatatgtgataacgaaatcgaattcgtgataatcgtatcttctgactcagttatgcagcttgtgctgcgcagtcacggaaatatcactgcaattggtggaatggtctgcaagtgtggttggaaggccagctcactgcgtcttggcgcaggaattctgctgagcacggaattaagacgaacacctgcgtggggttttcccaactaatacttacagtttatttgccaagtgctgaacacccacgggttctcgtcagacagacatgcagctttacctcgaatcaatttcctgcccgaaaagaacgagcgcagtgtatggtcgcctcgcccgcacggacgaattctctccatactccacacagagaggccttggctcttcaactttgaactcatattattgaagttacgtgatataaagcctctatagatttacagcttcgcgcttccaggagcaaagttcgatccagcgccctggctaatagcatcaacgatggcatcgacactatccaaaatccacgtattcccctcatcgctagccaaccagcgcgcagcctcttccccctcgacatcagtcgcccacgagccatcctcgatcgccttgcgcaacccaaacaagtgcgaggtgacttggggtgcaacgccagactgagcgcgcaagcacgagacagcaacaacagacgtcaggatccgcccaacggacgcgccagtgctacgctcaggatcagacaacagggcgccgtagttgttgtacaggatgtgcaccggcagatcggggtgtgagtcagctagtttattgaatagcttcttctcgaatggccgatagatggaattccagagcgcaaggccgcgctcgctgatcgcggtgatattctccggggtggggatgcgggtgggggtgcgggagagctggctggtgactgaatctggaaggctggctttcaaggcgttgaggcagtttatggtgcgtgggataccgttgaaactaatgcattttagaccgacctcgcgcatgagctcggccgtctcgacttgcttgttcgggttggtgctggctagttcgtagagggctgcgagggactcaggggagttcatggttatcgttgctgcagtctggcatttgttagattgcgttcaatcttaattgaatgaatcgactcactgatagtgcgacccatgatggctgcgagagctgtttggattgtgcggtctgttggatcttttggtagaccgaggttatgtttgctggcgcaggaatggtggatggccgggcagcaggggccttgattaatgccttgaggctaggtgaaagtttagacatttcggatgatgagctcttgtgctctgaatgtggatgtcttgccattaaatacaggatttgctaaagaccaattgtgttcccgacctcgggagcttcgggaacggaacccagaagtgagcaccgataaataccgggagggtggtaataagacagtaaattacttaaacatttcggtaatattacaggtggggaacacgtcgaaatccggggaatacggggaaacaaaacatccagacgcgatcttatggaagctctgtcattggtgaggatctgcgggctggtgaggaggtcggactcagaaatgcccaccgaagtgtctctctctgactgtttctgggctatttctttccattattttcctattttctccccatcctacgctgcggacagtacaggagaataatatcattcgtactccaagcaacaatccaagtcgccatggaccaacccaagtccacagtatcagagctggaagaggcgaagtcaggtcccctcgaccgacattacgaccttgaacatcaacagaagttgacacggagggtattgtggaagttggatatacagtcagttcaagcattacaattaccatgcgcttgctaaattttccagtattcttcctatcctagccctgcttttcctcatgtcatttttagacaggaccaatgtcggtaatgcgaagattctcggcttggaagcggacctttctatcacagaccatcagtatgatatcggcctggctgtgttctatctcacctatatttgcaggtgcgttgtgttctgttggacccccacgtcagaggctaattgatataaagcgaactgccgagtaatctagtactcaaaaaagcatcgccgaagatttggctgccgttcctgacggctatttggggtatcattaccatgtgcctaggatttgtacagaattttgctggttttgtcgtcgttcgggctttgctgggtatcgcggagggaggtcttctccctggcatggtatgtttccaatgttgaatgaaattgacatagttaactaacaaaaggaaaggttttatatctatcttctttctatcgacgaggcgatttggctctgcggatcggcttgttctacacagctgcttccctgtcgggcgcatttggaggtaaatattcatcaatctcactggttttcggcgatagtaacgaactaggacttctcgctcgtggactagccgaaatcggtcctcgaggaggcatacaaggttggcgctggattttgattatcgagggacttttggtatgtgaaggtaattgctatcaaaaacaaaatgctgtctgactgttgattagacgtttgtctccggggtgtcgagtttcttcgttcttccaaatagcttggaatctgcatcttttttaactgcagaggaaaaggaattcggaggtaaaaggctaatgcttgataatcccgggtcactagaagggtaagcttttctgacccgttggatgggaaagcttggctaacctaaacagatcctcggaggcagaatcgttcagatggtccgaagtccgtcgaggtgtgctagatctacaagtgtggctctctgcctcggcgtactttgccattctctctgggctatactcctttggcttgtttgtatgacttccctatttttacatcggcctcaagcactgacggttttagctgccaacaattatcaaaaacctcggttttgccaaagatgccaacgaggttcagttgtggtctgtgataccttatgctgtcgcagccgtaattacaggtttgtctacagagcacctttgaatttcatcaaatactcacacagtttttcagtcgttgtcgccatcatctctgatcgtctccgtctgcgaggcgtggtgatgctcttcaccctcccaatcgccatcattggatatgcagccatcgccaacattaactcccctcgcgttcaatacggcatgaccttcctcatggcaactggccaatacgctagtgtgccgtgcatcttggtgtggttgtcgaacaactctgcgggacattacaaaagagccactacatcggcgctgcagctggcaattgcaaatgctggaggattcgtttcgagtaagttgcccacactgaatttatttctagatcactgacatcactatagctttcaactatccatctagagatggacccctcttccaccgtggacataccattatccttggtttgttggtgtttgcatggtttatgtgggtgtatttatcattattgggtcaagggcgatcgctgatttacataggatcctgtttaatgtgctctactgtgcaaagatcaatcgagacaaaaggcagggtaagtatgatcaatacgcagggtataatgatgatcgtaacccggagttcatgatggttctatgatggcaatgttgtctatagacatattgatgtgctctacaatatactgattctggttctgggtaattgtagcaagcttaatttttagaattcaacgcattattctgcataaatcatctcatacccaccactgccaccagtgatgaggcttccagtcctgcttagttgcaccacgcaaatcatctgtatttaacacgtccacaccctcatgcacaagtacattccaaacatgattccgcagtccaatgggccaggtgggagttccccagtaccgcaccttcagtcccaacttgtgagcttcaaatacttggctccgaagaatagcaagctggatatctgacagacgactaagagaaagaggcccgataaccttgcggaagtctgctgatgcataatagctgttggatgggttataggtagagtccattggtttgttgtcgtttgccgttatctcggtgggaaaggtcaagttgccaagaggggcatcaaagaagacgtcgcggtaggttgtgttctccaacagtaggtgaaaaggcacatctccactggcaacgatagtaactgggccgtatacgatatcagagccattgaagtgagtcagatagcccttttcacgaaacgggttcagctgctcaacaagaagcggcaaggtgcgatcaccatcggttttgcaatcaaccagcaaggtcacagtctgctttgggtcattaggaaacaccccgactatttcctgattcatgacgtgcggccagcttcgggaaggcggtgcattgtgtgtgtcgagtatcttcaacagcgggtcaagatagaggctctgtagtgtgccccggtggactgtggaacgtgaatggccgactagaatgtcatttccccatggccagacgtcagcctcgacgctgatacagcctgcacgaagtgctgagcgtaggggaatgtggcgccagtaatcgttgtgcgagtggcatggtacagggatgacaccgttggtagaccagtcggaaaaccttgagtggcgttccccggggaaaatagccaacgaggtgtcatgtcgaaagagataaaaaacccattgccatgcaacgatgaagagattgatgataccgctgcagtgagacattgttagcaccaacaagcacaacgagtcaggtgtggggaacacaatccaacggccaacaaatcacgacggggtgtagacttgggcagcaggtacgcacaagacgaaaatcagtgcccagagaggtcgctgcactacgcgacagaaaatggctctcttagagcgtggatatgcaatgcattctgggtgcgagcatttcaaaatcgagaaagagggtcgtctgggcttcatgtagggcgatgtatttctcacttcgagatcgactaagataaatgcttcatgctccggaataggctctagagcagatggatcaaaggccatgttgggagggaaagaaaaaggacaagctttttccaagggctgggcaccggctaagcttattttatgaggcttatcgggtccaccccaaaatacgtctgcctaattatggtgggattgtataacttcgaaattaagcgaaggaataaatgaaggatgtacaggctatttataggagacacgagaaaagaacgctctttgtctcatatcatgctcggtgtcggagtgactttattccatgatctcaagtgtatcggcaacggtgaacttggcatccgtcttgctttgtacttcttccacctcaacacccggagcaagctccgtcagtgtgagttctccggtggcccggttcacctggaagacacactgtacttttgtcagttttggttggcaatcaatcagggtcgtcgcacttaccaggtttgtaatgatggtgctaacaaccttggcaccagtcaacggcagagtgcacttttgtacaatcttagacgttccatctttagcgacatggctcgtggcaaccacgatcttggtcttgtccgggttcgagatcaaatccattgctcctcccatacccttgaatatcttgccgggaatcatatagttggccaggtcgccattggcactcacttgcagcgcaccaagaatagacacatctacatggcctccgcgaatcatgccgaaggactcggcgctgtcgaatgtggcggctccaggaaccaaggtaacggtctctttaccggcattgataatatcgctggtctgagttagggaaagttcaggtcatcacatctgggaacaacttacggatccagtgtttcctccgtgggataatcaccctgaatattgttagaacggcctacgtaaaaaagacgtagaaactcaccattcccaagataccattctccgactggatccagaccttcacgtcctttggcaagaacgatggtgccaacgtgggaataccaacgcccagattcacgtagaatcccggtttaagctccttagccgcccgacgagcaatcagttctctctgaagctgagccgcacttttagtaggcccagctacagagggctcctggcgcaacttcttgttttcaatgtgcttgtcgtccgtggcaggaacgatccgatccacgtagatacccggtaggtccacgtcattagcatcaatagcgccaactgggacgatgttctcggcctccacaatagtcaatgttgcggctttggccatgatagggccaaatgctttggtagtatatctaatcaatgttagtatccaattctaggacacagactggtacataaacttaccggaacacgcagttaccagcctcgtccaccttccaggctctgagaatagctacatctccggtcaaggcttcttccatgagatatgtcttgccgttgaactctcgggtctcgcgcgccttgccagactccagaactttaccagactcatccatgcgaacggggatttttccctcctgaataaaagtgtcttctcttatcagcgacgaatatcaagaaacataagagaagctatacatacgggctccagtcggggtatagaaagccggaatgccagcacccccagcacgaagacgttcagccaaagtaccctgtggacagagctcaatagccgtgtgtcccgtcaagtacttcttctccaacgccttattgttcccgaggtatgaaaggatcagacggttgatctggccattcttcgagagtatcgaaaggcctcccgccgcggaaccggcattgttagaaatggccgtcagggagtgcaattgatcagcaccccgacggtgcatagcattgatgatggtttctacactgcatatcagcttcgtagttctcacgcaggttatttattcatccacataccagcgactccgcaaagaccgaacccagagctaaggatcgtcgatccactcttgatatcggcaacggcggcatcggcatctttgtatagctttgagcggctgcgatcgatcttaggtgcgagagttgctgatggtgtggttagggagtatctagtggtgctggtactgaatggctgcagggggcgcacgctggcgcggacaccaatgaacagtcgcggtcgacacgcagtgagcgctttacgcgacaaagtagtagatatcctaagagccgacatagcttgtgattgtttagatctaaagaaagaagaaagaaggcaaaaatgaaatcatcgcgttgttatatcatcgacggcattggtcggggctacttctagatgccgagcgcctccgaaggttccccgtgtgtattatctatgacgtcatgggtatccactaaacatcaatatcaacagacccttaatcggcccactacttcttgaacagcctcagcttcccctaaatacccgcacgttgccgacattactctgctctgtcaaagaacccgcattggaaaccattgtagagatgggcgcgacatggccttcctcaggcctctcaggtttagacttaagctcttttgattcgtttgtgaggtttgcgcgtttcaactgtaatgtttatgccaattgatcacagtagggattgtgtataaaaaatcgtatggttgaagatgtgactccttcatacttgtgagagaggacgatgatgttggccaaaatggccctcaaggatgatatgctaaacgaaagggtatcaagatatatattgaagccgataataagaatacgttcagaaaaccaatgtctgatcagatcaaggcaagagaaactactgaagattgaaatccgcattggcagagtcgagccaatcccaattaagcatatcatcaagaggcacatccgggatcgacgcaccaaacgccgtgcccgcccgattgactgcatcgacgatctgatcatcagacatagcagagaattgcaaaggctcgaaccagaggtcctcaggtattgccactggcagcggacgatcatccagacatgcagactgaaatgcctcggatggatggacttcacctagatttcctcgggattggagagggaaggctggtgcgcgccggatcaactcacgcaagaacctcccgtacagcacggaggcgccgcttcggtgacttggtgttgcgccgattctctctaggacgccggctgtctcttcgatgaggtttcggacgcttggtgctagactggatttgctgtcgccgggtgttacgctgagactgagggcggagcaggcggcgaaggagatcattatgacggtgttgtttggcattgatttcaggcgagattcgccctggatggctgctcgtaggacgttcagtgcagatgatagaccggcggctcggaagaaacgtttcacttcgattggagctgttcggtggttgatgacaccaccgtatgtggataattgagtatgcgtgacaagaatctcgacgtaggggggtagagagcgtgcttgaatggttaataatgagtcaatcaatgtctggtatatgcttactgtctccttccccaattgacaaggcccatgttgcataccaccgctcgtagaaagtttgaatggttttcttgatcctgtgatatggtcagtatataaatgatattcatcaagacataatatcatacgactgagcagcctccgagccggtatcaacgatgcgataattatcacagcttgatttaacattctggaatagtccatcctgaaatcgttagaatggaattaatagcctgatacgggcatctctgatggattttgagactcgggagggcacctacaaggtcccttcgaagaactgccacggaactcataggaccgtcacgcgggtctgcaatgttggaaaggtgccaacgatcgcagttttcgatgagcgttgttgaagggaccgtatagcttcggccacgcgcaagacaaacactgaacaagttagtgtcagactcaaatgcaccactaggggaaaacgtaccctctctcaacgacatacaacgcaatccaagctctttcccgtcttcgcaacagcctaacgccccattccgaggacgggtcaatatcatgaaatccatccatgtgtaaagccctcttagcgtcgatgcactctgctcgcgccaggcgattcataagttcttggtcaaagcttgaagatggcgagataatcttgttcaaagataagtcaagagcaacagtgagggccatggcaatataggagcaagtatcatcgtctcctagtctatcgcctggagacatccatggaacgttcaccatgaaagccagaacaatctcaacagatttatagcgttgtgtgatcactcgcttcgcaagccatttgcaatgccttgataacctcttagataaagcagacgcagacggcaaaaatagggctgcgcctgccattatcgaagtaaatagaaaagccgactgggaccgcacaaaggatggggtatgtatcaagggatcgaggccccatcgagtatgtgcgagatgttgatagaagcttggtttgtcagttatcatttagatatgtttaacaataaagaccagactacttacaacgagaataaggactccgactcatcaaatgtgaccaagcccaacccaataggatccatatcaggtccaacatctagattcgctcccgcgggaacaaaaaaggatttggcggcctgttctccctgggaagtgttctgatataatgacgggccctctgacaacggcagtggagatactggcgcacgccgcgtcccaactggcgaaatctgaagatttgaagctctagcaagcagctgcagaggattttccgcatcatccagagtaagaccatcttccgcttgaatatcacgcggagacgtcatgcgcgggcgatctgatgtctctgaaaagcgacgctcatgctcatgctcattttgcattaactggccccgggcttgaccaaggagatcctggaggaccgaaatggctctttgggcctcatcgtcactagcagagtcgaccttcggccgcttaattgcctgttcgatctgatgtatcgctttctccaggccttttcgtttgctaagctccagtcagtattatattatactccacaaccttacgtgactcgactcacttttttacccccttttgtcgacccagatgatggttgggcacaatacactccgcattggtttgcttacatttcccgcagctggactcgcctgcctggcggttgcagcggatcttgctccgtcggcagtttaagcatgcggcttgttttccatgttggctagaggttggacctgccgactcgagctccatgaataagtgttttgactgaagtcatggacactaagggagatgcgggaagtcggggacaattagcgatcagtggttttggctcatgtagcgtaatagggctgcctattccctatatgacagtgtcatatacagttatgcttctcaacgggctgcaggatgcgctaagaccgccacctgcatgtctatattctaccaaagaccttgtttccgtccatggagcactgtttcgctgctctcttcaacagcccggccgggctagctcaatcggtagagcgtaagactcttaatcttaaggctgcgggttcgacccccgcgttcggctattcctaaaaccaaacctgagatttcttttttgctcttttctttttggaatttgttgatggaagagcacattgatcggatcaattgatctttttaatttggtgcgaatcattttcgcttttagctgctcactgcgtagtgtacaacggtgactatatatgtctacaacgttatgtctttcccaattcaattatatgtatatctatagtgacatttatcgatattcactgggtcattaggcgagttatggctcgagatgatatcctgatttctgcaatggctatgtatgaatgtcataacaagtgggtggtatcaattaaagattagtagctaaatataagctcgaaaacaagaccgttggtatttccatgacttaaaacgacagtgcatatagatccgaatcaacataacaaacgatcacatatcatccaaatgaagcctagtgaacgggaccagcctccacatcatggcccggaagagcaccagaagcctccggagcagcatgaggctgagctggagcctgagccatctccggaccagcagcgggcgcaacttccgtcgacgcagctcgcgacggcgcactagtaccggggggagtaacatccaacaaccgcggacccgactcatcaggcctcttgctcgccttgaccgttgcaggagccggacccaagacagtcgggtacttgaagcggaaaccccaagcgaagaacaagcgcatcttcgtccagaaactcatagcatcccacctcttcttaaggatcacggcatcctctttgctgcgggcgcggtagcccttccggaaacaaaacagacagaaaagggaaagcgggagcagaatgaaagaccagaaaagagggaagccccggcgggtctgccagcccgtcatgagacgacggaagcgcacccaggcctcgatcatgcccaagatgaagacgatgccgatccagcccagtgcgcagatcaggacgattgcgaggtaggagatgccgatgccggatccccatgtgctggtgaaccagttgtagtcgtcgtagtcgtagtcgtagtagccagatgatccgccgctgtagccggtggttcctggtccgctggacaggccggtgtagtatccggagttgccgctgtagtcgctgctgtcggtgtactggcatttgctacctatgtatcgcgaggtaggggcattgtaggagctcagagagctcagggttgggctggggatctgggtgggttccacgaatactatttcgtagatgtaggtggtggtctggaatggctgggcgctgtcgactgaggtcgaggttattacattgtccctgggtagcaaggcggcgatctcatagggcggggtgacggcggcagcggtcgtgatggtccattgggtggagcaggctgtcggggctgagaatgtcaggttgacctggtagatggtgctgtgatagtttccgtcactatccacggtgtcgtagccggcgtcgaaaccaagcgccgtgccatagccggtgggatacagcttttcgacaacggtgtagtcataaatggtatcagtggaggtaatggtggacagggcctcagctggcaaagttgcagttggagtgatttcatggacctcagtgaccacctcggaatagtaatctgtagtaacgtcttgctcgtagacctccgtcacaatccaaggggcagcctgaacgcaactcaaaacgaatgacaagaaaagaataaacgagtgtgaaggcgccatcttgagtggtcctggggctttgcagggaaaacagtcacaaacgagggatccatggctttaataaaaaaaaaacgttaatagcgcctctgaaagaccctgaattttctggtcatttgggggcgctgttgtcgcctaagctatactggttgaaagcctcgggtggaaattgccagctttagagtaggcagatgccccgatgtgattggcgatgttcctcaattgccagagcgaagtggaggttctagtctgtttacgctctagtccctggaccctagccttttcgcctcacggactggtctttttttggacttttgtcccaaggttagcatggaaagcacacaaaatcggactagcccatgcatgaaaaaaaaaatcttcgttgaatacaaacagcgcagaaaatacaagcgtaacttcgtggatcgtcagtgttgcaaagtccagagatcgcgaggaaatctatataggggattgacagtcccgtaaatccggaggtacccaggaggaaaaagaaagcagaactgatttgctcaattagcagcccgtaaagcccgtagcctggcacccaaaccatcctcggcctcggcatccacctgcttaggctccttaacctcctccttaggcgcagcatccgcctcgaggttcaagcgcatatcaacacccgcatcatcagccagctgttccataagtcgatccacatcggcctcgccctccgcaccgtattcctgcatcgatataccctgtgcgacatcctcgatcgcactactcgcgatcttgaagtcctccgaccgggcgaggaagttgttagcgtgcgagacgaggtgttcgaggttgacgctccgcgaggcggcgtctaggccccgcgacgccatagcgagcgtgcgggatgtgtcgcgcgtgctctgggcggccttgagttcattgatgatgacatcggcgcgtgcggcttcggatttgagcgttacttggcgtcgcttctcgcgcacggcggaggcggcgtggatgcgggcgatctggaactcgcggtttttcatcgccttgtcggctttggccttttcggatttgaaggtcgcctcggcccggacggcttctttctttagtcggttggagtgtagctggggaagattagttggtttcatgcatgggcggggtcatgcacggtgtgaggggaacagaggaggcaacttaccttgacatttgtgcgggcttcgaagatagggtctttgcgaaccatgatgtcggttatagataatatagaggatgaggataggtgttgtggaaggcagatggatttgggggcgcgtggcaacgtcactgaccgcattcagtgtattcttagcgtcggaggtcgagtattcttagcgcaagcctcctagactgattaaatcaaggctactttcccgattgaggataattactatctacgttcgaaagattgcaagatgagccagtcgattttgcattataaaaactattatacaggccaaaaatggaaccctcagcgctgtttgcccatgagcaaagacgaaagagctttgctcgcgctggaactccgaaaactccgtgtacctcgatgcatctttccattactgcgttgccgactaaatttcattgtgtttccccgctgctgccgtttagacaggctgagactatcgattgcccaggccatggttaataacgactcccaactcggtcgagcctcggaggcgccagccgaccaggtctgtcgggagaaagtctcactaaccgctagctgcaatgctctgcccgtcgcatctcgaagcggacgcgccaaggctgggctgcaagctagtagtctggtgagaagtctcatccgaaagaccggtcggttggacaccttcgaggacgacagactcggggtcgaaatcaaccatagaatcaaagggaaatgctgatagatctccgccgtcgagaacgtcaaaggcgaacccgtcttcagggaaagaaggatttggctcagcgggtgaatcaccgtggaacaggcggcggaagtcatcgtcagaaagaggagctgcaacatcatgtgcagtttgaggttcggagaggtcgaagaggggaagggcgcttccagatccttcgaggccagcgacggacactgcaggtcacacaacaccgctgcaggatgttgtgtcacgtcggaggcctcagccagagtggaaggtgtgaaggtgggggagtagtcggtgacggatggagtggggaaaggaatccgttccatagggagttcgtcgccttcttgtttgaagagggtaggcgtgagggtaggagattcgatggccggggagctggctttgggagtcacgctgcgagatccacggacctcggcggagagcttagccacttgttggctcaagcggttgttctccgactccatctgcgatagacgctggatcaagaactggttctgttgctccatgcggatcttttcggtctccagcttctccatttcgaggcgcttgcgctcgcgagatgtttgagcagcagcacggtttcgaaggacccgttctatccgacgctgctccttctcatcatctgttttggcgcgttttctaaagagtcagttgggttcacatttacgcaggggtggacaacatacctgggagggagattggttttgggggttgggagttcttgtccccaagactttctcttctttgttggcttcttctcatcatcttcttccttaatgtcatcttccggctccggagagtctaatgatgtatccgcgggagaaactgtgtacatctcgggacatggggaggttgggagggtatccattgggttgatagtatccgccatggtgacagagtcaaatggataaccggtgccggacgtgaataataattgcagtacagagtagacagacgtatagtgacttgggtgaaaagaggaagttcagatcacaaaggccacgttattatcacgatcggcaccggagaccagactccgggaatagggttgagtcagagggtgagtcagcaaagagagaggaaagaatggaaaggacagctgttcaactgcaaacggaggggagcgatgaggtttaagtagaggccagcgtggtctgaaagggatgggctgggggcgatggcaacaaagggggggggaaccttggaacctggccaacacacgtatgtaggtacaagcgacaccatacattttcgcatgtgcgcccaagtacctccaaaggggcggagtttctgtgacgagacacgtaaattacgttcatttccccctgcattccatggttcggccccggacgacagccaatcatgatgtgccgtgttgaaacattgcgtttacggaactccgtatggagaacccgacggggcctccgtacacttggtgacttcaatgctgtctatctcacttctatatttgggttgcatacacttgctacggagtaatattgatgtactccgtattatgtacttcggattcatctcctgtcgggtaatacaacacacatccagtccctccgactcgatctatctgaatcatgatacgtctgtcccacaatactccgtacgaatgatcccatatcacacagtctcgaacaatctagggtggacctatggatacgctctcctgaatctgaagacgcgatcaggattgccggagaatgccccatccccacgccaatcacaggtctttcgcagatcaaggctgtccccgccccgttaattctccgtcccccctgattgagaatgtgactctatgattatgtaaatccatggataaggggccaatgccatctagattggcggaaatcagcaggcggatgctacggaacaatctggaacacggcagaacgtctacaaggtatgtcgagggctgaaacgggcatacactgcccctccgttactatttagggttggcctcggaagtcagttataggggtaaccgtggaacctgaccatttgcaaactgaaaagataacgatatattctaaatactccgtacactaaattcagtgatcggtgttgtcatcccattttggaaaccttcgacaccaggggaattatatgcagtccctcaaacaaaaaaacgccatcccatagaaacgtgctcatgacaatatcgtaagcgaacatgtgcccgggtaaagtatctacatggacatatccatcgtgtcgtcgccggcatcgagagcattctgcgcatctgggtcggggaccaccacaccacgtccgcggccagcaagcagttcacgtcgcacttcaggtccaatgtccttgtgtccacggacgagaagcaaatcgagaagcgcttcacgctggtcctcggtgatgtcgttacgataacgctgtgcaaagaccagaagggactggtgccagagaacgggcagccggtatgccttggaaccgacctcattcatggcatcggccgaaggatcgagggcgcggaagcgcatgaagtggaagaccagcgcgtcaatgaccttgtacggcagggcgtacttcttctctaggaagacgcggatgaacatgttgacagcaccggtgctttcaatggaagtcaacgactgttccgcggccagatcacacatgcggagcagggcggcggccgagtgtagcacgggaaccgagacgcgggcaatcacagaagagacaatgtgggcttcacgcagggtgcaagtgccggtggacacgagcgggaacagaagtcccttgaagaagcatgcgggcttgtacagggccttgcgcagcgcattgtaggtgtggatgttcaatttcttggtttcgtggatttcttcgcgcacgcgctccaaaagcacagtgttgataaactcctgggcaactgcaggcttggacgaaatgaaaatacgggttacagcgtagacggcgttaccggtccatgactctgggcgggtgatatccagaagggtctgccagttcggtacagaaggaaggatcttgatgggcttggggagcgggccagacttgtagcgagaaagaatcataccaaccctagaacaagttagcttggcctcacaaggaatgatcacaaaacatacttctcatatacttccacggccttggcaggaatctggactgcatcctcggggacaccaccaccttggatgtattgaccatagggaccctcgccagcctgctttgcctcgtgctcggcaatcttctcgagaatcaaatcggcgagattagtggggccagcggagctgggatccttggggtgaaatatagggtcctcctcgtggggcatgaatctgttgaacatatctagatcattgggatcgacctcctagtaagatgttagaagctatagtactattcaaggtttcggaagtcttacaacttgctcgacatcgtcatcgacccaatcgtcggcctcaaacttcccctcgtcgtcggagaaaggctcttcctcgtcctcgaaccgggtatcgaattcgaatgcactcgactggggccgtgctgagttcttgagttgttcggcagcatcttcatcggccaattcctgtccaatctgtagaatcttgcgcgacatcttcgcatcgacaaagcgctgtccattttcgccatcctcgtcgttttcgtcggctttgcctttgcctttgcctttcttgctgctctgtgtccgaaggtgccccgcggaagtaatatcttcagcaagagggttgtgtctgcgtgccgctgccgcggcacgggagctcgatacctttggcatggctggtaattcttcagataaaccaaaaacttaaaatgagtattttgggctggcttatcgaagtacacacgacgatcaaattgtgtggtcatatttttttttctgccaggcggtgccccccaatctcctctccgcctgtaccccacaccgcctgagcctctacattttctgcaattaatcactgaccgccctagtttcccaaggagattattgtctggtgcgcatgcgcttgactgtttttgtacacaaagagaagcttgctgtctatcaatgaatataggagtcatcagaatactataggacttcaatctgggaagctacagattaccaactcccttgatctttcggatatatacgccgaaacagtttaacagcatacggacaagcttccggttgagtaaggacctcttagctttgcgaagcaaacgccgtggagccatcctcattgattatagctggtcaaattgctgactctccccagaccgacagaccacaacccaagcggacaaacatagcctccgtcatggcatccggccaagccccagggtcttccgctccgtcgtccaacatcaactccccgattctaccccccaatggcggacccctgcttaatgcgcaatttaccgacctgaatccacgatcatctccagccccatccgcccaaggcgatggtcgagccaagcgcaacaagcgagacagccgcaagaaacgtgaagccaaaggattagaccccgagaacgcacctccaccaaaaaggcgagccacagccgcacccagtacagccttgcccagctcaaaactgagcattcttcgtccattgctgctcgccgagccgcacgactcggatcggtacactccacagcctcgccagttgaatcgcgtgagccgaaagacatcgaacgttttgggtcagagctgggatttctacgaggttgtcgataaacttaccaacaagaatgggtttcgttatagctacgccattgcagaccccggattccctcatatcaaatatcgacagacggatgttcacccgtaccatacccgcttcagtttcgaggattcaccggctgccatatttttttctgagaacgcgactgcggtgaccaccagtgatgcgtggcatactgcccgcgctaatgtatgtgctcgagagggcacgtattactacgaagctcgtgtgattagtggcatagtcaatgatccccaggcacctcagaacggcagaccgacaacttcaccgcgtggccatgtccgtattggattcgcccgacgtgaggccgatcttgacgtgaatgttggggtggattgctacgggtatgggattcgagatgtgaacggcgaagttgtcaatcgcatgcgatgcgagttcttcttccccaagggggaggccatcaatgaaggcgatgttatcggcatgctcattactcttccacctctttctctccacaagaagattgtcgagggcacttacgatcccaccaataataccccatcaccgccgatggcaaccaacatcatccgagatcggattccttttcactacaaatcggatttctgttggcagcaatctaacgtcttctctacaaaacacctccgtgactatgctttcaacctcaaagaaacaccgacgttcggtcccccgtcccctctgaacagcgaagacgccacgctccgcaccctcccagggtccagtatcaccattctaaagaacggagtacaaatgggcactcccttcaaagaactttacgccttcctaccgcccgcaagccgtctcgccaacggcacaaacaatctcggtattggcgagcgcgagaatgccgacgacggcctgatcgggtattatcccgctgttagttgctacggcggcggtgccgtcgaatgccgattcgaggggccgtggtgggttggtccacccaagcagactgaaactggagagcccgtccgtgctatgggcgaacgcttcaatgatcaaatcgccgaggacgtgatggccgatatcgtggacgaggtagaagccatgttcacgtggggcggcattgatggcgatgtcatcaagaacaacaccgagctcgacggcgctggggttgtgggaggggcggaggtgttgaagggtggtgttggtgcggcgcttgactctgcacttgcccatacccccggaactgccggggcatctgattccgctgctaatagcaatcgtgagacgccggctgcaggcgatgttgggagtcatggccttgaagatgcgatgagtgtcgggacagctggcactcctaatgttgaagtgcagggtgatggtgatggcgatgtcgagatgacttagtgacgcactaaatgggaaaatggattaggcgtttggcttttgcaatagcattgataccaattctgatttcaaaatctattcacataatatacatttcatatagtagtcgtacagcgctgggcttaatctaacttccttccctccaacaactctccgactttcatgaccaactgatcgtctccgtattgaccgatgacttggattcctgctagttcggtatcattctgcccagaaacagtcacggggactgaaattgcaggtagaccagccagactggcgggaacggtgaatacgtcgctgacatatgcatccaaaggtgacttcttgatagatttgctcatcaaatccgacagtcgtggaggggatgagggcgcagtcggacatacgatgacatctacgtcaatttcacctgcgattttatttgcatcctgtgcagcgagcggatgcttggctgtaaagaccgcatcaaagtcttgctggactagacgacgcaactgttgtgctttgatgaagtagttatcaatggcatcagcactcaaagtgaatgtgcctaggagaattcgtctcttcacttcttccccgaatccctctcctcgagtctttgagaaaagacatccatcaggctttccgtcaccatctgggccttcggcacgagtcccgtatcgtactccgtcgtatttggccaggtttgaagatgcctcggcaggtcctacgacataatacgtggataatgcgtgttttgtggcgggtagggagacggaatggagggtgtgcccttggcttttcaggtgtgctagagaaagagcccacgcccgtcgaaccgaggaagtcagctcggaaacgttatactctattggcacgccgattcggagaggggctgaagtcaagcgcgaggcaagctgtggtgtttgaagagaggcctggattcgagagcgggagtgtattgagaggctggtagggtcgcactggtcatgttggttgaggatgtctaggcatggtattagcagtcgttttccagtcacactggtcaaacccaccgaagatatctcgcacattggcggttgttttccccaatatacccacggtatctagagaattggcgtatgccaccactccccatcgtgagatcagtccgtatgacggtttaaatcccactatcccggtataagcagctggaagtctgaccgagcctccggtatccgttcctagtgagctgtaaaagtcagcaatcagtctgcttgctgattactagccacttacgcatagcattcgtcgccggcaactgaagcggcacttccaccagagctgccgccggccgataggtcctccccgctggagtcctgacgagggttcctgacaggaccgaaatgtgaattgatcgagtgtgatcccatcccaaactcgtccatatttgtctttccagctacaatggccccggcggcctctaattgatcgacaacggtggcattgaacgggctcacatattcatccaggattcccgaagcgcaggtcgtcggaagatcgcgcgtgcagatattgtctttgatggagatcaagcggccatccactgcggacttgggtttccctggtcatatccgttaattctgaagtagagtgtgggagtctgatgttgctaccttcttccttgcgcacatctgcttcctttacacggtccagccatggcccctcgcgcaacagcggggttatgaaggcatttaaaccacgtgtgtattggttagcgacgcatctttcagcttcgcgcaataaggacatttagacgattgtgggaggagtataacacagaaagggagtgggaacgtgaatttcccgggtccgtgctgcttttctatggtacctgtccgggtctctgtccccctagaagatatgtgtctacgtacatgtaggtatatattataaacttcatagtccggttagaaatagatacatagctattgctcaaatgtaaacatcgatatcacaattttgacctcggagctacaatgtcaacaacaagtttcttcgggccgagcatgaccgaccaagacgtcatccggatttgctcacctctctcctccttcactacctcacctaccagctatgttctcaagaagtatactacagacggccaaccgaagtgctcgccaggcctcagctcgagctgtaccgcaggtgctcggccaagctccattcggtcggcgatacatttcggtctatggctacacacaggcaaaggctctcatctactccaaatatggcgagcccaaagatgtcttgcggttagtccaagtcctcagctgcagttgagccagaaagctgattaatgtcaatctagcctacacaagcactcaatctccgcgccgcacgcaacccaagtgaatctgcgcttgttggccgcgccgatgaacccagccgacgtgaaccagattcagggtgtctaccccagcaagcctcccttccaaacggcgctcggaaatgcagagcccgccgcagttggcggaaacgagggcgcattcgaggtactgtcaaccggcgcgggtgtcaagaacctcagcaaaggcgactgggttattatgaagcgcacaggtcagggtacctggcgtacccacgcgcagatggaagaatcccagttgatcaagatcgaaaacaaggagggcctgaccccgctgcaggttggcactatcagcgtcaaccccgtcactgcgtaccgtatgctccgtgatttctgcgaatgggattggatgcgtgccggcgaggagtgggtgatccagaacggtgccaacagcggcgttggccgcgcagctattcagctgggccgcgagtggggaatcaagacgctcaatgtcattcgcgagcgcaagacacctgaagagaccgaggccctcaagaaggagctcctggaactgggagctaccgttgttatcacggaggaggagatgcttactggcaatttccgggatatggtcaaggagttcactcgccagggtcgggagcccattcgtctggcgttgaactgcgtaggcggaaagaatgctacctcgctggcaaagactttggctcctgattcgcacatggtgacctacggcgccatgtcgaagcaacctgttgcattgccctcgggactgctgatctttaagaacctcacgtttgacggattctgggtcagcaagtggggcgacaagaaccccgagctgaaggagaacaccatcaatgatgtgcttcaattgattcgctctggcaagttcaaggatactcctgtggatgaggtcaagtggagctgggagtctgagggtccagagttggcagagagcgtgcaaggcactttgggcggctaccgtagtggaaagggtgtctttaccttcagcggcggtgattgagtgaacagccacctggactatatgaatgtattataaagctacgtggtattttcccgatatttacttgacagttgattgatataacatgggtccagaaactaggaataattgtaacagaactgctagaaagtatacttatcaacactcccagttcttcttcacccagtcaagaatcaggtttgttagagacacatgtggcatgtacgcatcactttcctttgcaatatcgacatcaagaccagcaaacttagcagccagtatcacatatttctcgataaaatcaaggtagaccaaatccaccgtctttggtgtctcggatgcattgggagatacgagagcacgaatacagtttggcactcggtagaaggagatgggtgaatggatggtatcatcaccgtctgtgcctgcatcatcttgtgtcgtgtacccgggcacgagatccggaccggacagggggatctgctcgctagccgacggccattgttgggcaataacatcttccgggtatgcaagttgctcgggaggggccaacgttgtcggtgaagattcgtccgtagtttcgtatagaacttgaggctgctcgttcaaaacatcgacaataagttgtgccttatcatatgggacatctttcacgtagcggaaggtgctagtgaatggagatacaataaaagtcgagtcttgggtaaagggccctttgaagatatcgaacctcatagcgcccgtattaacaatggctagcctaggtatgtctccacgagactcatccttcaagtcacgcaaaacctcagtttcaagccaggtgtagatgctgttggggtccgggtacttggttcgtgacatccataaatcatgtggggcacatccgtggacttggtccagatgaaggtcggtccgtgctttggcgatcatccgggagacattgagacctttttcggttgggaaggtctctcgatcaagaccggtgtgatgataataagaaaaaagattgttgtctatgtatctgcgcttgaagacaggcccagcagcagactgacggcttgtcttgctggcgaggccatcgattgacatgaaaccaacagtttccatgaatcgaccgctcgctagcccaaaggccttggaatcatactgtgcatagtcacgcacatgctggtgcccgccgaagaattggattggagtatcccaacgaattccccggatctccttgaagatcgcccggtattccggcgaatgaacaggcacatggccgatcaccaaaaacagatccacttctttatcccgaatggcttcttggaaccagtcctccttgatggtagaagatactttctggaccacagtattgttgtaatttccattgaaatcaaagaggaagccaaaggctactatacggatgccttgattcttggtagtgaacttcttaaaccgcggggctagaggcacaagttgttttgtggtcgggtgaatgatatcgatattcgaagcgagatagttgccccggaaatttggaacggttatgagaagctctgcctccgatgtgttcttctggtatagttcgtggtttcccgacgtcaacaggtcgatgtgctggtgccggacaatgtctgaaaggtagatacccttgggcttggacgagtcatataggccgttcccttccactcggtcaccagtatctataacgagtagatcttgtccttgtgcttctgccttttcccgcatgtgtgttgtaaacgatacatagtctccccagtctgcggagtaggacggcctgcgattattagtacaactcggagctcagcagggtccaaggcctactcctgcagatgaccagccagccagccatgagtatcggtagtatgaatgaaattcagttgcccgaaatcaagtggtcgcagcggagcggagatggggtcgggtgcggagggttgagcggcgagcgccgtcggaagtagccagagcaaggacaacatcattaccaacaatacacccttgaaagagtgtctaggagcatggatttaaagcaagaaaaaagatgcaagatgttgaaagatcgtaaaagaagctgaagggagcacgtccaacaagatagcccacagaagatatgtggtgtaaacaagatgcgagctctctccaattcttgtatggttacagttacagtaccggtgagcagctttgatatcacgtgtcgcccaacatcttcggatttgcagctcaaagattatttggacagcgataagtttcccttaggcatttacttcgattcattcgtccgttcctccattcaattgcttttgcggtccgatttggtctgcgatcttgaattgaatccatttgtctttgtttttcatcttctcaattccatcatatctccacaatggcagctccacgacttttccgcccaacagctcgtctgttctcatcgcgccttgcttccactgctctgcgctcgaatatccgccagtctgcctgtgctccttcaatcctgcgccgcggatatgccactgagaccggcaccaaggaggtcaccgttcgcgatgctttgaacgaggccttggcagaggagttggaacgcgaaaagaagtgctacattatcggtgaggaagtcgcacagtacaacggcgcgtgagtaatcctctaagcttcatttgaatcgaaactgacgttgaacttcctgtacagatacaaggtgacgaggggcctgctcgatcgcttcggtcctaagcgggttatcgatactcccatcacagaggccggcttctgtggtatcgccgtcggttctgctcttgctggcctccaccctgttgtgagtatttatgaaaattacggttgatcgaggatcgcatactaatcgttcatgatctagtgcgagttcatgaccttcaacttcgccatgcaggccatcgatcagattatcaactccggtgctagaactcactacatgtccggtggtattcagccttgcaacatcactttccgcggtcccaacggtttcgccgccggtgtcgctgcccagcactcccaggatttctccggctggtacggcagcattcccggtttgaaggttgtctccccttggagctccgaggatgccaagggtctgctgaaggctgctattcgcgaccctaaccccgttgttgttctggagaacgagtaagattccattccatcttgccagatttcgtgtaaactaaccaatgctaggctcttgtacggccagcatttccctatgagcgaggctgcccagaagaacgacttcgtcattcccatcggtaaggccaagattgagcgccccggaaaggaccttaccatcgtctgcatatctcgctgcgtcggtctgtctttggacgccgccgccgagctcaaggagaagtacggcgtcgacgctgaagttatcaacctgcgctccattaagcctctcgatgttgagaccatcattgcctccctcaagaagaccggccgcatcctggccgtcgagtctggctaccctatgtacggtctttcttccgagatcctggctcagtgcatggagtacggcttcgattatctgactgcccctgccgtccgtgtcaccggtgctgaggttcctactccttatgccgctggtcttgaggccatggccttcccccaggtggacactattgttggccaggccgtcaagcttctgcgcttgtaagccaatgaacgagggcgagtgagaagctcgcaataatatagctatgtgcctagtaccctttcatctgttccatcttatgtcgttgttttattctgcctttgttatccaatcgtttagacagtcttttggaaagcatgtaccattacatccagatcaggaccatcgtaaatgtgcttaaatgtggcttagatggaaattcattgctgccagtaatttaaaacaaaggacctacccttaaacgccagtgtgtatttgatatttcattcgaatcgcaagccattcccgtcatcacgacatcgatcagaccttttgggcaacacacccagcaaaacagtccgttggccgccgagggtcataatagccttctgggccatattcctcgtcatcactttcaacatcaccatgttcactcttttgtctttctttatctgcgggagcatcggtttgaggtttcgggctaatattctcgtcgtcgtctcctagaacgttcttcttcttgactggggctgtggaggccgccgttcccttgacagcggagaatgagcttttgaaacctcccttcttgaaaccagtacctcctccacttggtaccacattggccacaggagtctcgatgactttcagaccggcctgcgcatcggctttacgttctgcccgacggttcttctcgagggcatttggatcccgtgttagctgtttgaggtcttgcaaacgctttctgtgcagatgatcgtatgagccaatatgtgcctcgtattccgggtggcgcgagtaagatttgttgcagaggctgcaggtgaaggagctgagcgcagaccgcgctgattcagtctgtaatggttagcttggcgatagcgaatgtggctgaccaggatggttaattaccctcggagtgggatttgtgaaaccacgctatgtttgttagctgaggtatcggatttggaccacaaaggaagagcataccggtgccattgttcttgaactagagtttaggtgaagttgagtgagagagcgtttagtacggccgggcattgcgaccatgtgtgtattaataacgggtctaacgcgtcgctgcctgtgaaaccaggcaatctatatttaatgtctaggctttcatcctcgtgcactcttttgaagagttatctagctaattagactggctctatttattgagaaatccttctacctatacccaatatctaactctttatagtaaatcaagtaagtcgaactatagtgacattgtagtataggagtcacctgacttgtggatactgctcaggacaaatcgtcattacccgccgaggaactggcctatcacagctgccgtattttagcaactcagcgatctttaaaccccaacatttccctgctttttcttagttcgcctatactactttgtacaaatatggatgcatgattgacgacttatttccttacgagttccattttcacacttttcctccagctcccgagcaccaaaaatcccgataaccatacaatgccgtcccacctgctctccaaaccggacgacatcgacaccaggtctatgatctccctgcaagaattagacccatcacctgtccatgatgtcctggatattgaaagcggcgaattcttccctagggccacctctccgacgcaacatacagctggtatttcaatgccaaaactaggcctgagcggccatagctgggattcatggcgtacgtcgagtgacaaaatgctggatcatatattctaactacgatgaccgcttagtgactggtatccaaaaatactcaacctatccacctacggctttcttcatcctacatctcgcgaacacctctcttataccactcgttactcgctccgtgcccgcgagcgaatcctatcttttgctcacacgacccgtataccaagcacccggactagagcatctcgtcttaacacttcctataattgcgcatattgcctccggaattgctctccgcaacattcgtgctgcgcgtagagcacgtctgtacggcgccgagactcgcgcccagcgaagcacgttatatttctggccgcggatgtcattgcaagcacgcactggatactttatcgtgccgctggttgcattccatgcactcgtcaaccgtgttacaccattgatcgtcgaaggaggaagctctggcgtaggacttggatatattgcccatgggtttactcggaatcctatgttctggaatgtcttttatttcttttttgtgaccgccagtgcgtggcactttgttggtggctgggcgacctggatgggctggagagtgaccacagcgcgcaaggagcgtagtcacaaaggctcgttggatggctaccgtggacccacggaaacaaagtcgaagaggcagcgcaagatgtggtgggttgtcaatggaattgccgcggctggcgcggctctttggcttgcaggttctctcggtattgttggacgtgctggcgaaggtgctggttgggaggccaaggggtggaatgagatgtatagtcaggtcccgatcgttgggaagtggctgtgacagctttgcatgattgtacattatgtatctatatagacttaaacctaatatatatgaggagtctgaatacaaccttacatacatgtacttttatagttgatataaattacaaaacaggtattgttgtgtactgcagactggtccgtgcatagaatctttttctccgtcgcattcaacgtcttttgcgacatgctgtgaaaggcttcgcccatgaacgcctcgttgatttttggatcagcaacgagaaggggtaagcgaatactcattcctaccattattctcgcccaatccccccgcccgacccccacttcgatccgatattgtgtccgattcctttccacttctagagccatggaggttcctcagacccagctggtggaataccagggagacaattatcatgttgtcaaggaaggtttggcgaagattctcaatccgcctgcccaagcggccgcttccaagggaacgaagaaggatctcaaagacgacgatcaagcgcagtccgtcttctacaacccaattcaacaatttaatcgcgatctcagtgtgctagccattcgcgctcacggcgaacatataattgacctgaagaaacaaaaagcggcccaaaagctgaagaagcaggcaggcaatggggataagaaacgaaagcgtgaagataaccagaccgagaacccaagacccgcctcaaaagcagaaaacaaggaaaccatagagacaaacgaccaaccagtcccagctgccttagtccccgctcccgcggttgatcaaggacctcagtcagaagctcaaccagagcaacccgcttctttcactgttcttgatgctctgtctgcaactggactgcgcgctcttcgctatgcctcggagcttccatttgtcacaaaggtcgtggctaatgacctatcagagtcagcaatcaaatccatgaagaaaaacattgattacaacaatcttcaaacgattaaacccaatctggccgatgctcgagtttacatgtatgggcttgaccacgcgagcaagttcgacgtcattgatttggatccatatggcacagcagctccattcctggatgctgcagtgcaagcagccaaagatggtggtcttttgtgtgttacctgcactgatgccggtgtctgggcctcgaccggctattcggaaaaagcattctctctgtacggtggtatccccatcaagggcctccactcccacgaaggtggtttgcgattgatcttgaactctattgctatgtccgcagctaagtacggaatggccatcgagccattgttgtctctatctatcgacttttacgctcgtgtctttgttcggatccatcgatcacccgcacaggtcaaattcctctcgggcaacacgatgctcgtatacaattgcgacgtcggctgtggcgcatggtcaacacagcccattgggtctaccaaatctagattggaccgcaaaggaaaccccatataccaccacggcctggctaaagggcccacagctggacctaactgcgagcattgcggcacaaaaacacatcttgcaggacccatgtggggcggtccgctacacaatcccgactttatccaaaagattttggacatgcttcctggagctgatccagaaacatatcagacctgtcctcggattgagggaatgttgaccactgcccttgaagaggacctggacttaacaccatctgattcccaaccatccactccaaaacagcctgcgccaagcacgaagaaccagcatgactctgcataccctgccatcattcctcgaatggacgttgccgctcgggaaaaataccctttctacttctcactcagcgctctctcaaaggttatccactcaaccaccattcctatcgacgagttccgcggtgccctcagtcacctcggatatcgttccactcgtagccacaccaagccgaactcagtccgcacggatgcgccctgggaggtgatttgggagatcatgcgcgagtgggtccgtcagagagcacctatcaaggaagcctccctgaagcctggaacccccggtgctgcaattatgggcaagagccgtgaaaacctgcgtaaattgaacgatgaagaccaatggctatcgcttctcaaaaaagatctgatgtctgccgtcgaggccggcagagatgtcagtgacttggtcactaaggtcgaagcggctctctaccggtccggatcgcgaaactcgtcccagcgtactgctgcttctgcggagactcgtcccaatgccgatccccagcctgtacccgaaaaggaaaagtcacctgcacagcccttcaagcggcctcaccctagtacccttgaggtggtatttgatgaggctctaggtcgtgaggtgtctgctgcgcataccaagaaacgactcgtgcggtatcagctcaatcctcgtgctaattggggtcctctcaaccgggcagggcgttaacgatattcactacatgtagttatacttagaaaagtcctctgtatggtttatactttgtcgaacaaacctatacctatttaacatcgtagagtgacaagcccagcatgtctactccgcgctattattcccattcctggtactttcaatgagtcatggccataatggttggaatgccccattcgcccaatttcgcccaatactttattgttggggccaccaagtgcttagtcacaattcaactagaatgtaacgttaactaggcaacgagaatgtaaggaactatataccaactacatatatgtttctttcattggtatcgtgaaacgcttctggagcagatacatcttctttctatgaaaatggctgtcggcggctgtttctgcggcaaagtccgcgtcgaatacaacggccaacccctgacaacagttagtacaataggattccctttcgtttagtataaccaagctaatctgttgcaggcactgtgccactgtctcgattgtcgcaaacttaccggggccctctacacgtacaatttcgtcgtcaaaaccgcagagttgaacatcactggaagtccaaaagcagtgccaaaaacatcggatagcggaaatgatatcaagaattatttctgtcctgattgtggtttgtatcttactgaatttaggaacgacagtatctgacgaaagtgataggcacgccgctttatggacacaagataaagcccaatggagaggctgaggaggttacgatcgtccgggcagggatctttgatgatacggagattttggatgaagggaggcctgcggtggaaatatacactgagagtcgattgaagtggctgagtcctgtcgagggggctgggcaatttattggcatgttgtctgtaccttcacttgatgatgcttgacggcggaaagcagaaggagatttctattgtagaatgtcgtgtggactgctgttgcatgtcgaaggtgtggtagatttcatcttcgtattataaaatatgaacactattctaggaagtgattcgaaaactactgtattaaaatgcaagttgaaactcatatacatgcacataaaaactccaagccttttgcgacatatcacataatgacccatgaaacaaaaaaaggtctatcaaaaacacaacattataaagaggatatcaacaggaatagatcatttcggaacattttcgctgccctcttcgtacttctcccagttcgccaaaatagaggcaatgcgaggcgagttggtgagcctgtagacgtcctcgaagtattccttggtgatctcgaagggacgggcagtgacgttggggatgtacttgccgatcaacttgctggggtcgatggtggtcttgttgatcttcttcagcaagaaagaacggaagggcttcacaccagagcgcaagaaggtactgtggaatggcacatcgatacccttgagaggaatggtggcgaaaccacgctccaggttgatgggacgcggtttggcctcagtttgcttgacacattcttggatgatgctgaccaggtggtccttgacgtcctccaaagacatgctctccataagagcggggatgtcgatgttctgcgccttcaggaagttcagcaggttggtgaggcagtcaagagcacggaggtcaccagccgcgacgtattgcatgttggcaacgttgtagttgacaatctcgagcaaccagccagtggtctcggagatgttctcaacaacgtactgcagtgcctgctcgttgaaagtcttggagatacggctggggttgacagcgcacatggagtagttggaacgaccctgtgcatcacgctcgaccgcgacttgcatagtcagaccgcggtagaacacgacagacaccaagctctcaatgggcatgacatcagccagggcggccaaagccgagtattcaccaagcgagtgaccagcgaagctgctgtcgcgttgcaccaatcccttggtgcgcatgtcctcgaagctggccttctccatcagagtcaaggctggctgagtgaactgggtggcagagagaagaccggtgggagaccggtaggtgtacgaagcggtattctcatcgacctccttgaagatcttctcggacttgatggatccgtctgcgttcaccgactcgaaggtcatggccatgtagttctcccgaatagccttaccccgtgggccaccgaagtagactgtcagctccttggggttgttcttgacgatgtcaataatggaaagaccgtagttctccatgaagtgacgatcagcccggtcccagacctcctgggcaactgggctagagccatacagctccatacccatgccctgctcctgagagccctggccagtgaagacgtaggaagtgactggctgctcgacctctgcctcaccctccatgaccttctcttctgtctccttgttgctggcctcaaccttgatgatcttgcgaccagcaatcatgccgacatgctgcagcttgacagtgatgatgtcgttgggcagaaccatgccgaccagcgagacttggaaaccacgaacgcggccaatgttgttctcagcggcccaggtctcgaccaggctgcgaacggcggcactgctgtacatgccgtgggtgatggttccaggcaagttggcatagctagagaagacacgcgacacgtggatggggttgtagtcaccagacacgcgggcatatgtctcgttggaggcgggggcacgcagttctagagcggtcttgccactgagcgggatggggttttcaaagtagactggctgttcaatggaagttccgttacgctggaggtagtcaatcacggggttaccgtgtgagtcacctgcctcgtattcgacagacgcaacttggatgatctccttggtgggaagctcgagaagaacctgcccaacggtttggacgttgctgaagacagtggtgttcttgaaacggatcaagctctgcaagcggaacgtcagggtctggcccagaagctcaacgtcagagtcgtccatgcggaaccattccttggagcggaggatggcgacatcccggctggttgcgaggtgaacctgaatgggaacctcatccttgcgctggaaggtgttctcatagtccacgtaagaaccccggtacaggaactgactggtgacatgcataatgggtttgttgtcgcgtctgatggtgccgcaaacctcgaccatcttaccagaatcctggttgatgatggagttaatctgagccgtggtgtccagaacatcaccaacctttaggggctgggcgccgggcaccatcttgaacccgttggacaagtgaacaagcttcagcaaatctccatcaatggtgcgggggaagataggcttggtgattgcctgccagcctgccacaatagcaaagtccataggggcaaagacctccttgccaggacggtcaacgaaagcctcactggtgttgccaactgcgtgaacaaagtcggcaacatcttgggcagtgatggttttctggccaccactaaaggtggcagtagtaggggtgtcgaagggaacgtccttgttgccgaaccagatccggtagtagaactccttgatgcgatcgttgcggtcacccataacctcacgaataggggcgtatccagtctcggggtgataagtgaacaagaagttcagagggacaacgccattctcggcggtgcggccctcgatcagggtcagcatgatttgccccttctcgttgatcttggcctcgaccgtcttgaccaacttgccagactggtacggctcccgcacactaatgacagtcttcgcaggatcattggggttggagatctccacatacatgcctgccgtgggagcgacaatccgcttcatggggttagactggaagcggtggccctgaacgaagacatcggccaagaacaaagcatgtctccaagagtagacattgccggcaagaagaccgagccagcggtccaagtctggcaaggctgcagtggaagacaagcggaaactggtcttgcttggctcttccgaaataaccaaatcgtcagactccaattcggtggtgtttgtgagctgcccaccgaagtactcaatgacaggaatcttggtgctgtcgccgccgtagacatcgcgcaagaggccagcgatgtggccctggtgaacaccatcaaggatatccttgacgggctcatcaatgatgttggagaagcgagcagccacaggaccctgaagaatacaggttcggccgacatcttggtcgacaacagcctcaagatcctcactctgccacagagaatccttcttgaagaagaactcaaagttctcatccagcacggggacgaaaggcacgggcttctggccgcgcttctggcagagcagcaggaagtgctgcacatcttgtgcgttgatcagctgattggcagcttcgggataagcagacaaaatattgtcgacggtagggtagggggtatcaagatcggaataactttgaagcagcgacgcctggccttcggcagtagtgaaacgctcctcgacacggcggatgaagtcacccgtcaagcgcttgagcgaggcatcgatccatcgcgactcgtgcttgatgtacatgaggtccaccatgcggtgaacgacctcagcataagtcatatcttccagatccacagtctcgcctgcggcgttgcgaccgaaccagaccttgtggaagtcatcattcagcttcttgatgatgtagttccgttgcttcttcagctcaggcacacgcttggccttgtcaagcttgaagatcttctggtccatctcctgccagaacagcacaccgcgagtggccagcttgtggataggctcacccatttcagacagaacggtgatcacaccacctgttgatttctggtaggtcttttcccactccgcatcgtccacaccaggagcatcagcaattgccttcttggcattgtgagaggtgtgtgcctctttggcgatcatcatgcgagatccgaagagacagccgtcgaagggcataggagggtagccgaacttggcggaccacgtaccggagaggtaaggataagtgtcttgcgaaccaccgaagccactgccggcaacaagcacaatgttgtcttgcttgcgaatccggctgtacatctgaagcataggctggtggaagtcctcgaaggagtggtgaccaccgccacggccaccagtccactgaaggatgatggggaacttagggttggctttggcaacattgatgacttgctgaatcgcatcgacggagccaggcttgaaggcaatgtgcttgataccaagggtttcaatatattcattggcaacttcaatagatggcacaccagcgccaatggtcagaccttcaatgggcacgccctccgcgcgcaaccggccgatcaacggaatctgccaggccatcgcacgcgggttgacgtagatcaagttaatagtgataccacgtccaggggggatagccttctcaatcttggtaatggcctccgtcatcgtcttcgcgttgtagtagccaccaccagccagctcgatgtgataaccggcgttcatagtagcagccacaaagtcccaggcaacggtggtgggtgtcataccagccaccatgacaggggggattcccaacagtcggctcatcttggtgtccacgtaggtttgaccagtagatgtctttgtcaagcgagggccgtgttccttgacccagtccacagcatacttgacggaatgctcatcacggtcaaacagttcgggcttgtagccgacttccgcattggttccgtccatttcaccggcgaggatgacccgaacaccggtaccgtccttgtttctgttggtcaaaacgcccagaccagagatgccaccggggccgaaatcaaggatgtgggttgcatgggggaagacagtggctttctcccagttgaccgcatcgtgggtgatcatgcgaaccaatgcgggcacaatgtccttgtcgccgagttgccgcagatcctctccagtcttggtgtggaagacggggatctccagtgacttggcggagatctcaacaacatcttccagatcctcgagaatgcggtcgtacgcagaaacaaggtactggctgtggaaaggagcagtgatagggaggaaacggttgacaaagcgaaccttgcgctgtgtgaatggcacgcgattctggtcaagtccggtgggagccttgaccttacgcaggcgaacattgagaccgtagagcgaaataggaggaccagtcaccacaaagttgcgcgcactgttcactagggaaatggaaatgtggcggtcctcgggcaaatgttggttggtggcatcgatgtgctcctgaacggcggcgagcgagaggtcgcggatagacagcatgggagtaggcgttccctcgccattctcaaccgagtcctgaagaacggacggggcgatagaggtgcgggggtaggcctgctgactgcgcagaccaatccagaatagcatggtcagggcattgcgggcggctgtggcgaaggactcccagctggttgcagttgcaatggcggcggctgtgacgactccctgggagtgacctgtcgtaccgaggaagcggcccaggatatcaccaggctggcggcccaggactttgcaggtaaccatatagtgggacaactggaccaaaccaatcaatggcaaactcacgggcgcggacacgagataatcgatatcaggctgtgcatcccggtcttgcagccattgcaagatatccatgcccttgggatagagcttgctagcctcgggctcgtgcgagagcgtctggagcaattcggcggaggacgtaatcaattcttcgacgaaagaagggtacgtggtgtaaatgttgcgcaattcatcaaagtactcctcgatattgccttgaccaccgaacacagagtagatacccgcggcctcgtcggatgccgcacggaacaaggccgaatcgtagggcttggtgggccggcccgccgcagctcgcccggcgtagtaggcctccacgacttggttcttcttagcaacaatgccggggagcgcagctgccactgcgtgaacatcattgccgcgcatgaaggcacgttcaaattcattcaacgcgagtttcagaacttccaagtagttgccctgtgcatcgtcttcgtcctcgatctcgtgagccacatggccaatgtagcgggctactaactccgtcactgatgatggctcatcgtcttgggccaattcgtctgtgggctcgggtaacgaagcagtaaagctgtctttcaactgcgaggcgtggaaatgaagcgaggtaggaacgaggaaagagaactcgagggacccatgggagagggtgagtgggcggagggattgcgaggatcgaggagtgttgataccggtttggggaccggtcaatgtgccgtacatgatgtggctctctctctctgaaagggaatagaaggagattaagcggaaaataccagagggaccctaaaagcgaagaggggtttcctgtgttctgttagattccgaggacacaacacacacacgatctcggctgcactcactggaagacctgagttctaaaggtctgaagtgaaagggggggtattatcaagggaataaagagaagtagagggacacaatttcaacagatatacacataaaataagaaaagaggtccagagcacgattgagcctgaaggggaaagaaaaaaaaggtctggttgaactgcagacaattcaaaagggtttagcgtgggagaagacccgccccaatgggttctgacttgggttgaacccgttgggacgcagtacactgtgataccggtattgtcatggagcatggcaatgatgttttttaattgattttgaattgatttttgaattgttttgtggtttttttcacttcttttgatatttgcatatgacatatttaaagcagcatcgaaatattactctagttcccacctatctcgtagactccattcgtaatggccgttgggattcttcttgaacaacgtatgttgtacaagctagtctgtcccctgacccaagctagctctaaatgatccacgcaaatcgttgcttagtgtcagatccttcggccgaagctttgaaaccccaacgccctcaccaatttggaccaaattgaccgtgtccctccccattcttccgaatcgcgtcgtcaaatgacttggcaatttggtgggatcatcagcattattactcttctcattgcctgatatcattttcccagttctctcgctgtctccaaggtgggtggttcctcgttttcccgttattttcattgataaaactgcgaaaattaccgtccggtattcgttgataccgcatctatcgccgcgctccatttcctttcccaccttttttttcccttcttctttctggatcaatccaattgtcttggggactttcactgatcacttcatacataggattgactcctattctaattctctcctattactctcttctagtcgtcctacccactccttcctctctccgcttgggcattctacgacaactcttgtcgcgcccaaccccggacacttttgtcctaatttcgtccttctgtttaatcaattgatacccatcacatctatcatgcgtccggaagttgaacaagagctcgctcacaccttgttggtggagctgctcgcctaccaattcgcctcccccgtccgatggattgagacccaagatgtcatcctcgccgaacagcgcaccgagcgcattgtcgagattggtcccgcagatacccttggaggaatggcccgccggacactagcctccaagtacgaggcctacgatgcggccacttcagtccagcgccagattctctgctataataaggatgccaacgagatctactatgatgtcgagcccgtggaggaagaaccagaggctgctgcagagcccgcttcctcggccccagcagctgccgctcccgctgctggagctcctccgccaccccccagtgcaggccctgcggcctcagtggaagatgccccggtcacagcagtcgatattgtgcggacgctggttgctcagaagctaaagaaaagccttgcggatgtgccattgtcaaaagccattaaggatcttgttggaggtaagtgcagcctagtccccttcaaaaaaaaaaaaagttggtctggtctaacaccgtaaacaggcaagtccacattacaaaatgaaatcctaggtgacctgggtaaggaattcggttccacacccgaaaagccagaggacgttcccctcgatgagttgggtgcctcgatgcaagccacattcaacggacaacttggaaaacagtcttcctcgctcatcgccagaatggtctcctccaaaatgcccggtggcttcaacatcactgctgttagaaaatacctggagactcgatggggtctgggatccggccgccaggatggtgtgctcctgctcgccctcactatggagcctcctgctcgtcttgcatcggagacggatgctaaggcctatatcgacggtgtaaccaacaagtatgctaccaacgccggagttaacctttcggctccggttgctggtggtgacggtggaggtggcggtggtggcatggtcatggaccctgcagccctcgatgcccttaccaaggatcagcgagctctgttcaaacagcagcttgagatcattgcccgctacctgaagatggaccttcgtggtggtgaaaaggcctatgtgacatctcaagagaaccagcaagtgctgcaggctcagttggacttgtggcaagtagagcacggcgacttctacgccacgggcattgagccatcgttcaacccgctgaaggcccgtgtctacgactcttcctggaactgggctcgccaagatgccttgagcatgtattacgatatcatctttggtcgcctgcaggtggtagaccgcgaaattgtcagccagtgtatccgtatcatgaaccgctccaaccccctcctcctcgatttcatgcagtaccacattgacaactgcccaactgagcgcggagagacataccagctggccaaggaacttggacagcagctcattgagaactgtcgcgaagtgttggaggtggctccagtttacaaggacgtcgctgtgcctactggcccccaaacaaccatcgatgcccgtggcaacattggctacaaggaagctcctcgcaccagcgctcgcaagcttgagcattacgtcaagcacatggctgagggaggtccgatctccgagtacagcaaccgcaccaaggtccagaatgacctgaagagtgtttacaagctgattcgcaagcaacaccgtctctccaagtcgtcccagatccagtttgatgcactgtacaaggacgtcgttcacgctctcggcatgaacgagagccaaatcattccccaggagaacggccactccaagaagggcggccgcagtgctgccaaacgcgttactgccacccgccctggcaaaatggagactattccattcctgcacctgaagaagaagaccgaccacggttgggactacaacaagaggctgactggtgtctatctgaatgttttggagtcggctgccaagaacggtctcagcttccagggcaagaacgttctaatgaccggtgctggtgccggttccattggtgccgaggtcctccaaggtttgatcagcggtggtgctcaggtcgttgttaccaccagtcgcttctcgcgcgaggtaaccgagtactaccaggccatgtacacccgttacggtgcccgtggttcccagcttgtggtcgtgccgttcaaccaaggtagcaagcaagatgttgaggccctggttgactatatctatgacaccaagaagggtcttggctgggacttggactttatcgttcccttcgctgccatccccgagaatggccgtgagatcgactctatcgattccaagtctgagcttgctcaccgtatcatgttgaccaacctgctccgtcttttgggctcagtcaagacccataagcaagctcatggctacgaaacccgccctgctcaagttgtcttgcccctgtcgccaaaccacggcacctttggtaatgatggcctgtactccgagtccaaacttgctttggagactctcttcaaccgttggtactcggagaactggggccactacctcaccatctgcggtgcggttattggctggacacgtggtactggtctgatgagcggcaacaacatggtcgccgaaggtgtcgagaagcttggcgttcgtacattctcccagcaggagatggctttcaaccttcttggactgatgtctccggccatcgtcaacatttgccagctcgacccagtctttgctgatcttaacggtggtctgcaattcattcccgacctgcagagcctgatgaccaagctccgtaccgacatcatggagaccagcgatgtccgccaggccgtcatcaaggagaccgccatcgagcacaaggtcgttaacggcgaagacggtggagttctttacaagaaggttgttgcagagccccgtgccaacatcaagtttgaattccctaagctgcccgactgggagaaggaagtcaagccgctcaatgagtctctcaagggcatggtcaacctggacaaggtggtcgttgtcactggtttcgctgaagtcggtccatatggtaactcccgcacccgatgggagatggaatccaagggcaagttctcattggagggctgtgttgagatggcgtggatcatgggtctgatcaaacaccacaatggtcccctcaagggccaggcctactctgggtgggttgattccaagaccggtgagcccgttgatgataaggatatcaagcccaagtacgagaagcacatcttggagcacactggtatccgtctcatcgagcctgagttgttcaagggatacgatcccaagaagaagcagcttcttcaggaaattgtcatccaggaggacctcgagcctttcgaggcttccaaggagacagctgaagagttcaagcgtgagcacggagacaaggttgagatcttcgagatccccgagtctggagagtacaccgtccgtcttcgcaagggcgccaccatgctcattcccaaggctctacagttcgaccgtcttgtcgccggtcaggtgcccactggttgggacgctagccgctacggtatccctgaggatattatcgagcaggtggatcccgtgaccctctttgttcttgtttgcactgctgagtctatgctttctgccggtatcaccgacccttacgagttctacaagtatgttcacctgtctgaggttggtaactgtattggctctggtattggtggtacccacgctttgcgcggtatgtacaaggatcgcttcatggataagccgttgcaaaaggatatcttgcaggagtctttcattaacactatgtccgcctgggtcaacatgctgctgttgtcctctactggtcctatcaagactcctgtcggtgcttgcgccacggctgttgagtctgtggatattggttatgagaccattgtcgagggcaaggcccgcgtttgcttcgttggtggattcgatgacttccaggaggagggctcttatgagttcgccaacatgaaggccactagcaacgctgaagaggaatttgcccacggtcgcaccccgcaagagatgtctcgccctgctactaccactcgcgctggcttcatggagtcccagggttgcggtatgcaacttatcatgactgcacagcttgctctcgacatgggtgtgcccatccacggtatcattgctctcaccacgaccgccactgacaagatcggacggtccgttcctgctcctggccagggtgtcctgaccaccgctcgtgagaaccccggcaagttcccgtcccctctattggacatcaagtaccgtcgccgtcaattggatctccgcaagaagcagatcaacgaatggcaagaagccgagcttctctacctccaggaggaggctgatgccatgaaggctcagagcgacgagaccttcaacgaggccgagtacatgcaggaacgtgctcagcacattgagcgcgaagccattcgccagaagaaggatgcccaatacagtctgggtaacaacttctggaagcaggatccccgcattgctcccctccgtggcgccatggctacttggggtctcacagtcgacgacattgacatcgcatccttccacggtacttcgactgttgccaacgacaagaacgagtccgatgtcctctgccaacagatgaagcaccttggacgtaccaagggcaatgcagttatgggtatcttccagaagtacctcactggtcaccccaagggtgccgccggtgcctggatgttcaatggctgcttgcaggtcttggaaagtggtcttgttccgggcaaccgtaacgccgacaacgttgacaaggtcatggaaaagttcgactacattgtctaccccagccgcagcatccagaccgatggtgtcaaggcgttctccgtcacctccttcggtttcggtcagaagggtgctcaggtcattggtatccaccccaagtatctgtttgccactcttgaccaggctcagtacgagacgtacaagaccaaggtcgaggctcgtcagaagaaggcctaccgctacttccacaatggcctgatcaacaacagcatcttcgttgccaagaccaaggctccttacgaggatgatctgcagagcaaggttttcctgaaccccgactaccgcgtgtctgttgacaagaagacctctgagctcaagtattccgccactggtcccgaagccaagaagtctgaaagcactcgccagaccctcgagtctcttgccaaggcaaatgccgccgagaactccaagatcggtgttgatgtcgagcacatcgattccgtcaacattgagaacgagaccttcgttgagcgcaacttcactcagagtgagcaggactactgccgcaaggctccctccccgcagtcctcgtttgcaggccgatggagcgccaaggaagccgtcttcaagtcattgggtgtcagcagcaagggtgctggtgccgctttgaaggatatcgagatcggagttgatgccaacggcgctccagtggtgaacgtaagtgcatgattatcccatgatcccagtgacaaagctaacatatctccagcttcatggtgccgccgccgccgccgccaagcaggccggtgtcaagaatgtcagcgtgagcatcagtcacagtgactcgcaagctgtcgctgttgcggtctcacagttctagagcaccgtgcattttcttttcatgttcgcatatagatcccagagaccaatggttctcttgggttgagacgtaatgattgtgatttatgttttttagattccgaaccagcttcgtctcctggttcgttgtgtttataatgggagtgatgacattttctatgtcttttttctgttgaattttcatttagagcttatagtctcttgattagcgatattatcttttaaaaataacaaagatttctatccgtatacaaattgaagatgtagtcatgactccatagtccgtatctccgcagaccctttctctgtgtacttatatcgcagttcatagcaaccagcttgggagtctggtcctattggcttttattgcgagcagaaaattggccgtacccaacttgaagtattatttaaaaatggaaagagtcatgcaaaataggcgtctttgtacacgtaaaaaccaaatgcatcaagtcagttgcatgttatatatacagctttgtacttttccagtgggcatatcatatcccacgagacaatgtattcttgggtttggtcagtactggggattgtagtaggccatgacgtgcagcttgacaactattggaaggcaccactcgatctcaaacgggcaggaagggactggcaagggactgccccaaggcaagagcgttcctggacttctgcccaaggagggaacgataaaagaagtgagtataaatggaaaggtcaaggcatatattataacccccaaccctcctgcttttcctaggctagctggtgttgaagaacctctggatccttaatttttttcctccttggggatcatttgaagctattcacacttctaacccaccataacccccacccccacccccacaattcgggcaatgggtgtttgtaacacagcccgaaagggaaactgcgatccttttagctaaggttattagttatgcaaccttaaacatgcggaaccacgggtcctcccatcctctaccaatgaaaatcctggcctcaggtctctattcccatttgacattgttcattaactagggattgtatcccattgcttaatttctgtcactgtgtcgaggtatcacaagtggatagggcccgaggctagtaataattttcattggtacatatgtagaggatatcaggtaggcgttcattatggacaactatgaaacaaccaggatagaccgctaacagaagatattcatagttaaagcaatcctagtcacaagatgtttgctggacagtgattggtagatagaaaatagaagtaaaaacatggaaagtattcaacatttaattttgactcggaagtacctttcgcaagcttcagttgcccttccaggggcctggtcgcagcatccgatcctcttttccataaacactgacgtccttgacaatggcaatgaatctccggtggttctccttggattcgccaatacgagggcggaaaaccttcaagaggtcgctgctgaggatgccagatgctgggatggctgcgtggatttcgccagctgtcgggaacgtctggttgccagaaactggagtcgacatacgaaggcctgctgatgttagtttatctcttgcatcaaatatcgattgggaccgaaactcacctctagggccgtcggggctgttggcacggcttccggagagtcgaggcaaaggacttgcgccgcgagacccttgtggagtgccgccacgagaaaccgaagtaggtgggttgagtttcagtttcttgatcttaccaccctcggtcatttcagctccagatccggcagcagtgtcgccatcactgccagatccagcaccaccagcaatgtttcgtacgcgtttcttgccctagagaaatcagtatatatggccaaaggggaattattgtacctacctgcaaagcggatggagagatcggacgcgatgggggttgagacgcagggagatgcatgtttttggccttctttcgagatgtatcggtgccgctcgcgtcggaagcgtttggtgatccaagccttttccgtgatccagcagctgaagctttcttcagggcgtctgtatgcttgggtcgaccggaaggagtatttcctcccttggagagcgcttctttttggttcttttcttcttctgccttcttccgttcttcctccttggcccgttcggtttcgctgtcgtcggagctctatacacattagctttgggtctgctgtagcaaatgagtgaaagcttacctcctcatctgtgtacggattgacgtcagaaccgctgctgtaatcaaagttccgttctctcctcttcagagccttgcgcacacccttgcccaacacacgccgggcctctcgttcacgtttctctcgcatttcttcagcgtcatattccttctcgtccttgagattgaacacattcgccttgagctggtcctctttgatcctcttttccgcatccttggcatcttcatcctcattgaagaggtcatcatgttcttcgtcgtcggcaaatcgatcctcttcgaaatccatttcaccagcttccaatcccgcaccctttccggcggttgtgccctgttttccggcgtagactttgcgctgcttggcgtatgtttccagttccttttcttgctccagctgctgctgcttctccatgaaccatcgggggtctttcactctcttagccatgaatttctctgcttcgtcaatcgtcaaagccttgaaattactcttagcgttaaacttgtaccacttttcggccggtatcattctcatctttccgttgtcgaggacaaagatcgcatgtgtttcggacagggctgcttcgtagtttccaacccaagtgtgctggttatcgaaatcctccagatgccatggcaaggcttcttcgtacttgatccgtgctcgtgcaatttcttcgggggtcatatccgacttgaaaacctgctgcgtcttctgctttggggcatttggtcgtttcgaggttgagccgagggcgggggcgatttgggaaaggttctcagcgcgctctttttcacgtgctgccttgcgagcatcgaaggcttcgcgttccgcttcatccattggctggccatcgatctcggatctccccgaatttggatcatgagttcgtgaacgtgggtcgcggcggtgaagtcggactggtcgcgtaaattgtgattcatcacgtgggtcaacgcttttcttcgaggcaaatcgcgcgatgtggtgcttcagtccctccatcagagctcgctttgtcgtcaccaccgggtaatcaacatatttatcactgagcaaaggaccgctgaatccattcgctgccatgtggttgtttgaaagctcaagcataggtcgctcggacgggaagattgcctggttgtggggcctttgcggtcgtgaaggaagagtcttggtggctactccattgccggcaggagtggcgccagctggtctgggaacaggccttctcttcggtcgaaccaaaggatccgctgcttttggacgacgcatcctcatcagcggtgcaccatttgggccggttggagtgcgagcattcgatggattcgtcggagtcgacatgttgccgacgtacaggacggagtcgtacgagtggtagaaggtgacgcgaaggatcgcactagggtggaaggacagaacaaaggtagccttttacctgttttgtgttgcgacaaggggcggccgacttaaaaaagagtgagagacgctaaagccactttgagagcaccgaccaggaggtatgacggtagacctcggagcaaatgtttacccgtcccgccagattggccacgtgactcggggagatctccgggtcgtgtggtccgtgcattgggaggctcttttaccttaaagatcacctctataactacagcctaactgcgattgagaatagaatccaacggaagcaaagagactaagggtcaaaacaccgtagtcggtctgaactgaagcatctctaagatcctcttgagccagctgtatattcagattatccaagtccttaacttcaaagtcattgagaacagaggcgcatatgcagccgaccattcttgcttttttggtgattgtgattgagtactagatgtagtgtatctgagatttggtataattcactggatttctattgtgaatttctatttccttgttttttaattcatgcaaaatctactgaccgaatcgttgacccggttccagtggtttgtatggacaagcaatccaatcacagcccttgacacaattagtagggaccaaaaacaaccagaagaccaaggacgtacctgtttataaatctccgtcccccaccatttgaaaccatcgacccatcccgggtaaatgaaggcgaagaagacaacgaccactgagaatgccaacccggaatccaatgcggccgacaatgtcattgcatatttttcccaccatgcggtcctccttcgccggatcacataattgaacacaaaacatacaagggcccagatggaaaagttgagcccggttgcaggtgggatccagctcagactgccaaacaagatagggaagttgaccatacgccagaaactcttcttgctgtgtcttcccagaagccacgctccgagaggggcgatggctcctatcaaaaaggcccagacaagcggacggtatagccctcctgggccaaagaagcgctgcgggccaacgactccccagagaatgctgccgttgaaatggactcgagcaatggggcagttgaaaccattgatagcctctggggtgcaaagccccgggacaaaagtgaacatccagttcagcacaccaatttgggtcagactcgagactaaagtcgccatcatctgcacgccaaacagaattcgtggtgggatcttcatgtaatggccgagcttgaggtccgaggaaaatttgatcccttgtgcagagctgatatatgagtaggtcacgaaaatcatgttcgctacaggccttcccgggaatacaataccgcaaaggagttggcagatcagatagaggctgctatgttgattggtgacagccatgatgatacccactgggatgaaaaacacagaagtaataccaagagccaggagtaggccataccaaggtaaatgtgttgggtaacttttgtgcaggttagttgctatcgaaggtcaagggggattgaaaacgtactattccaccgtgaagatggcaatgacaagcatagaaacgaacacaacaagataccacatgaggggagcgtccttatagcgcctcatcaagcgacaatgaacatcttcccctcccaatggaatgtcctggctcgcttcacgtgagctagtccttgggatttcataactctgtcggggagcatcattgcttccacgaaggggctggtacgtctccatgtctggcacttgccgtttttcctcaaaggccttcctagtctgttgccaaatgtccttgccataccagcaaatggtgtgagagacaagggatgtcaaagcagcaaactgaacaccgtaagacagcacgtaggtgattgggagataaactggggagtaatcttgataggccttttcatcaaacaaaaaatccgtggtcaatattcggctcacgttgtatggtcgcccggaattgtcgaacacagctgttgaaactatgggcatatatgcagagaaaagcacatttttataatcttcatttgatcagcagagtcaaattagataagacgggggggccttacaaagtattggggcggctatccagatgacaaccaccagtcccgtgacaatattagctgcagcccaccagggcgtgagtaacggtgagccaatataggcaatctgagcccaatcgaaggtcaagggaaacattccgagaccagaggcaacaccaaactaaagagagttagctatagcagcttaaaaagaggacctgaatgtcttaccaaattcgaaatcaccacatttttgggtgccaaccaagtgatcacattaaaataactcagagcaggcatcaacagtcccgggacaaaataccagagaaaggcccctgcccacacaacgacgaagaacttatatcgggagatactccacccatttgcctttttgttgacagacttgtgcattgtagagaacattgcagtggacatcagggtccccggccagatcatagccgatggccgcacgaggaatcgtcgagttagacccgcgaatgcatatcccaaaacttgagtggaaattatgagcagcagctgatatataattggaacatcctggttgtaaaatttatgttgctcaacaataacctgtcttgggtcagcttcgtcatgagtatttcgttggtctactaacatcagtcgcgaaagcaaacccaaaggaaacattgctgctgatgtaaacgcaagcatgctccttttcgttccaacggccctgggcaaaccaaagtctgactcgagacgccaatggaacaggaggggcctcgatatcaccggagagtgattcccggtggtgaagggttccgttttcaaaaaactcgagcggatcacctgtttgtctgaaaattaaatcccaaaatttgcccagtggatggactagaacaagagcaatgattggtgtaatggcaacactgggatagcgcaaggaaaagaaaagattggcggcagaccccgtcaaagagaataacaacgaaagaatccacattcgaggtgctagagatcattagatataaggagaaaaagcaccagaaagaaagcctactgttaatagaaagagagaaatcatctgtcgccggaacggaagcccgaacttgggcatacggcgaattgtctggaggatcctcatccgaggattttgaatcatcatcatcaatgtcgaggacattttcatcatcacttgtcatatatggtgaagacgccggagtctcctgcatcaccgggttacccggtacagccaatccagtagcgaacgagtatttcgaatcaggacccattcccacatcggacgcggcggaggaaggccgacgatttctctctgcatataagctgtttcgttgtctgacaaaggaatgtgatcgtctcggagtagaccctggtacgttggaagaacttccgatgccatctccgaagctcgcgcggtgtaaccccccacgaactttcggcccacgcgaaacgggtgtgtcctcttctgagccgtccgggtctcgcaatgctccgtaagagggagcgcccaggacgggcgatgaacgaagaagaggggcgcccgacatgaaggcccgaaagcgctgaacaatccctgtgtcggggttcacgccgggtagtggattgtcgatttcggggtagtttccattgtcgctcgcgctatcatcaaaattagaattagtttgatccggtccagcgggaagccactcgcgcctcgaggtcgaggggcaagacagcttccgcgtccgcagtggaatattggccgacgtggtggtggggttatgatgaaatactataagtatttcaggttaggccgtgcattagctcaaaatagatcagggcattgaggaatcagaagagaagaccacagagctagtggaggactagagcgtagtgtggtgaaaaacgacccgttgtccgagctcatgggcttgccccaccgacatcggcagatttatcttccctttcgaacgcaggtaaggttacattcaaggcactaacaacaatagaaagtgttttatagtgttcgcttccatatgtacatttcagtttggtatctaatcattaaaacagttctacaactttttcatcctcgttttgaggcgcctcgatttgaggttgttcgggctccttttcgccttcaccctcaccttcctttgcctcgtctcgcatcaggacttgcactaaccggtcgcatgcctctgtcacattttcatcttcaacgtgcatatgagtttcgcgaatcaatgggtaaaccttgactgctcgcatcttctcccggccgtcccgagttgtggttaggagaagcagggtttcgagatgggttgtgataatggtagggtcgctgtctcgttgcttatcgggcggcaacagttggaggtctggcagcatgtccgccgtatcatcttccgccagctcctctggacctgcaagcgggagcaataagtaaggcaaaaggttggcaccgtcctcgtcaaagagcattggatgcgagtcgatctcaaaagccacattcttgattgtggatgcaacacccttcctccggatatcgcttcggtgctccgtgaagaccgtcagcttggtgatggggaccaccccatcgtactcctggcgttgagtgaaataggccctgccctgttcggtctgggagaggtcggcaaacacgtacgacaggtaatcataattggcgttcttgttgagaccaccctcggcacccttgacgaagcagtccatcacctgatcgatcgcgttctcggaggtagatacggattcggggactttgcgcttgagagcgaatagtttgtttaggttttcggatttgacgaggttggctaaaagcatagccacttcatcggcgttaggctctttgggattctgggatcagacatattagccctgttaccgtctagttatgacagtcgagaaaactcactgtcaatttcgtgagcaattcctcaataaacttgtcatccccggcgaggagtttcaacacttcttcatcgccagacaaattgaccaggatagtcaatgcattcttcgcaatgggctgtaaaaagatatcagtcgaaagtcacccccatgatcgcagataacgcacgtcgtaatcgcggactagaagcatcaaatcgcgaacgggtaggagttgattgcgcttgaacacttcaggctgggtggtggagaagccgacgagggtttcgcaagctatgagctgttagatcatatgttcgtgctgtgtgagaagagttgccatacatatttgtctgattggggtattgccatggtgcaggaattccaccagctataaagagtcgtgagtgagctaatcaatatcgtaggccgtaggcacgcacatcttcgagttcagtcggcatattggagtgtaatgtatgagccagaaagaaggggctgagtatgtggtatcgtcaattccaaaactgtagtctcaaaagattttttttcccgcgcaagtgggggtttctcgacgtcactggaaacgcggagatgcctttcagggctgctatttgtaatacaacacatattcatacatagttatagacaatctgaagagtgtaaaagtgattattcaataataggcaatacacctaatcagtctatatttccaaatatacatgtcgacgttactatattcattcacagaagaggtcggaattgccccgcgatctttagttaaactagccatacctgactaagcacatggtaaaaagcggcgaggccttagcacttaaaacggaaaggcagagcctcaggaggaagtcaccatctccaacatgttgagagttcaattatcagtgaaggttgcgtatgaatttatgctgctcttccgcctaagacttctaactgttgtaaaaatgtcacagtttcctgctttcccttgctagccactaaaatctaggaaactgcatctcttttccttctcgaatttccaggattctttcgaatatccatactattgtaccacagtacgttcctacaaaagccaaccgcccgattcgactgcccttggatggtagaaggcagatacatagagaagagactacaccagccaagcttgccatgccaatatcggaccgtgttggagtttgataattggccaagaggctacccggtcatgaagttagcttttggatgttattatagtggaaagggaaagccaacatacaaacatattgctgagaataatgctgcgaatctgactccgaaagatgttgatattgtccgatgacctgcagagctgtctggctgtgtatcaacaatcgaagccaagccatggcaagcacaggcgtaaaaaaagacaaaggcgccgttggtgtgatcagtctggtgttgcagagctttgtcgctcccagaacaatacccgcttgcccagaaaagccagagaattgctccattagatattgagtccaggattggtatctccttaagccgtatcggtggtgaggagtatgttcaggtgagaaaaagaaatgataaagtgcaaagtaacaatcgaggactttgaactgatgcaggtatggagcacaagacaatgaaagctgtagtagctttggaaacaagtagcacaaattcatgattttctcgagataatactgcaccctctgaaaaatattttgtcttccgaggattctgtatatcggaatcatagtcgtaagcgtcgttgacaccgaaggtcacttgcccaagttagttaagatcaggatcattccgactttggtttcagatcactcctacctaagcataaagggaaagatagagcaagagcaaacagtattgccggtatcgtcgacggaaaatcgccggcatgaagaatacccgaaaaatagagacaaggggcaaccggccaccaaagtgggcggctgaccatgaacaatattcgcatatttttcaaggaagtcgatgtcttgaacatatttgaagaatgatcaaggagtactgggctgtatgctgttgagaaaaggatatgctacgcaaaaatcatatcgtggatagagccagctcttatagattccaatcttgccccgccttaagcgcttctaatatacatcgttttggtgggatacagtattttaaaccacctgcttctactccgtactgcaaaggaagatgccagctcgaaattcacttcctattgatagtctactctagagtacaagggaggcgcacgcgtaatttacgaaatatacgaaatgataacaaagtacctgcatacgaaataaaaggctctttttgctcttttctttgagatagacatacagggatatgaggacagcgctacatgtaaagtcgagtttttgactcgagtcatgcaagactatagccaatacaagcggagttgaaatgcatggcaccataaaagtatgatgaagacccccgggatgattcagctactcctcgtagtgcccaaagggtgacttggaaagtgacctcgggcttgattacaaggattaaatccctgtaagccaccgcgcacgcgcgcgcgagagagagggggactcagcgtaattccgaaacgggccagctgcatggggataagcaccacatggtgctcgtatccagagcgggccgagagcccgttttacccgttacctgcatgccaagatctaagatactctttctgatcctaaccacgataaaggtggcttgcatgcgcattattcgaacctatcacatccatatatctatgttggtggcgggcagtgttggctgtattgtagagtgatactatcatgcaggtatcctaagaatcacgaggtttgactttataagcagccaagcaataagaatttcccgaatcctcgaacatgcttgtactacaatttatctagtcaagctggttagtccggttgagccaataggtgcactccaacatacaggtctgattgggcctgtaatacacgaagcttgagaaaggctgtaacattttgagtctattgaggtgctgggcagacctgcatgaagctgagagttcagccgcataacctcgccctgccataaatctactctttagcttccttcatactcctgtatttgttattttcttggatttgcagtgataatcatatttaatcgaatatgataccccaacgtactcaacctatcagaatagtggtggtagtgatgtactgggagttcgacgtttcccatgaaaggcaagagccttgggacgctattaaggctaaagatgcatgaattggagtatgactggttatgtagccatggcttctttggggtttcatgagagtgatatcttagaccgagtttgccgaggcatcctgcatctcgaaagctcgtttcacaaccccggttctagaaacaattcgcgaactagtccaaagttcgcgatttttggcgaatcgaagcggcatagattcgaagcccgtaatcaagattcgaattcgacccgattcgcaggaaatcgcaaactgcgaacagttcgaaacttcgtgcggagtggtacatcgagaggagcggaaaaagttggaacttaaagctcagccagtctttgccgtctagtacgcgccattgtatccaaaatctctatctctgctgccaagcgcgttttgttgttcagctcgagacctggatcggccgacatgaatttctcgtctccgaattctagcggtaatttcttgtcttgcatttccagcggaagaaggcccagtgcctcaatcaaccacatgaatacggggacacacgacagagcccaaatgaggaaaaggccgaataaagcgagcatcaaaaaaatgatcatcaatgcaaatcctggaccgtccgacccaacgaatcctgttgcacggacggaagctagaaaacatccccaagcggcacagggagcgccaaaaaatacagccagatgagagagcctaggcatggttggtaaagagggaattgaatggggattttgtatatgtggttcggggttgggccgacttatgtagacaacaggcgactcgtgcgccgctagtaaccggaagtcacgcccccggcccgtagtttacccaccccactcgggtggatgcacgactagcaggaactcctagactcatcagcttatcgttcggcacgaatttgactgtgtgcaggttgtagggcttgaatctagcgactatgatgaggcggctcaaagaattctcttgagaaagagttgttcttagccccaaaagaattatgggagatatcggtgatgagatcaactagaagatcatacaatgcagtccaaacagtcacaattcccccttataatcatattcgcgtaaagattatcgaagatttggaagccggaacttggcattgaagtactgaggatatatatatgtaattgaaacgcctcatcctcatctcagggaacttcgtcctgtcaattaagaaccctgtttccaagtcttctaacaagtcaatgaagtcactgggtacttaatcggctcggcagtaagacacaagtggccagtccaagtgcctccgtgagagaatgtgcgtcgagcaagaattcgaatttggcttgctcttgattacatccgcaatgaaatcgtcgggtagatgcctagggctgacttggctgcaaagagcaagggcatttcgggcaggtacaacatatgatttgaatggccccaaatacctaggcaggaggccaattggatcgaataaccgagaccattatctatctcgtactttgacgatgtaaaaagatgtctgtggacattcgtggtggtcaggaaggatataatgagctactgagcttactagaaagtagctctgccaggcacaccatgtaatgattggctctttgtaaggctagttcattcacttgacttcaaaccggaggtgtacgtagttgagtacgtacttccctcgagaaggacccacatatcagaccgtgctagcaatcccatgtgcttaagcgaattgcatttagggaagatccaggtttgtgggaaaagacaaaccaatcacttcatacggcacagttttataaacgatatatcccccactctaaaatacctataatatctaaatcgatcgtactgcaggcaggcgcagagctgaacttcctaggactcccaattggaacaattgttgacctatcaacggtagaccgtggcaccccgcctccctcctagcgaagcggttcgcgagcgtctccatgagatgggcaaggaggctgctagaatggaatggcgagatccttacgtatcgatcgttccgtcctggattaggagactcatgccccccttttattcgcgccaatatcacttctaagggctcgatggcaacgagcaagacctgactgaaaggggtgaatatggtattcgacataggtgcatatcggactattatcgctaaagagctcctctaccccacctttcgagaatacctgcgggaccctatgaatagcaaacttaatgaactttccgtgaccctccccgcgcacagtacctggaggtctgctatccaaactgtggtagcagccctaaacgatgtcgatgaaccctttcttgtaataccgcgaagaagcggtaaccgtcgtgtttttacacaattgttctaaggacggagcgagatggggaagtttgaagaggattatctcttcagggtggaaggtcttggttcgatcgagctatgaggcgcgttcaactataaatcatgccttgttaaccgaagaacgcagtagtccatttttagagaccgagtgattccagaagaacaccaacactgagaagactcgtgcggaataaagaacggctaaagttcatacaggacataccaaaacgaaaacatgaaaaatccagctcctgagacagaaaaaaatgtagccaagcgaggtggtagcagcaagtaataaacaagagtaaaaataagccactcttcgcaccgatacatcgattcaagcaaacaccatccaactaaagaatttcaaattgagacaagctcgccgtccagattggcatattcctcgactaaaatgtctccccagagttgatctgagaccccctctcccctggcgagaagtacatgccgaggaatagcccgaaggctaagtcgatcaatacaggaaatttggccgaataaaatcccaactagctggttgggcatcttggccttaggcagaataagcgcaacggcgtcaatgctagtacaggaatttgacaaagccagactagaatcaacctgcacagctataccgtcaggcgagcgatataagtcgtggatagggtcccgcaagtattctcgaaaggcgggggagagtagctcttcagtgataatggtccgatgtgcacctgtgttgaacaccatctctacctcttcaagctcgcatgtcaggtcttgctcgttgccatcgatccctttcaaggtgatatttgcgcgaatcaaagggaggcatgagtctcctaatccggcatggagcgatacataaggatctcgccattccattttggcagcatccttggcaatctcacgcagacgctcgcgaaccgattcgctacgaggtggtcggggtgacaccgtccccaggtcaacatttgttcggattgggagtcctttgaagttcacctccgtgcctgcctgcagtgctatctcacgaatagctcggcggttaccgcatctgcgcggcattacaagaaaggattcgtcgacgtcgtctagggctgctaccacagcttggatagcagacctccaggtactgtgcgcggggagggtcacggaaagttcatcatgtctgccattcattgactcggaaagctggcggagaagttctctcgggtgcagtgttctttcttcggtacccatagttgacctaaagaacaagattcataagttctctgtaagattatagatgcttgtttgatatgtacttactcttcttcctcttcagcctgaaggcgaacacgtttggtttcaacagcagctactgcttggctgcattcagagtagggtcgtttaaaactagccacgatgagctggtatcagtgattgtgtcaaaatattagtaggtgaaaggctgcataccttacgtcgcgataaacgtagtcgttccctcttgttcaaagtaggaagccgtgtcttttgagtgtcgataaggcaggagcaggatcgatgacagaaaactgacgacagagagtgaatttctatttctcggtcgggtcgcactgggaccaacgtaggcccgcaacgcactggccggctaagtccgttaactctgacacaacatccaacatgggacacatacacgaccctaaggaccctcataaagcggcagcacccgaccaagaactcgcatccgcagcctaagatccggtatgaattacatgctgctgcatatgtattaatgcaaaaataacgtctccctgccggacgggtgaatatgtacggccacccggtggagtacagtcacagagcctcatccctagcctacaatataatccaccaatcaccacccgcggtaacattgacgctttgcccgggtgtgtatcgaacaagatgttgccagatcattgcgcaaaggcaacctttgcaacaacctgatgagcggcatatttccgtgatgtaaagtataaatgaatatattactctgtacggagctggacagtacaaaaaagcataacaataaaaaatgaaaaagcgaaactaaaccttcttcccagataacacccgttcaaaggtcgcaaagttgccttcgttcttcgggtcatagacagcaaagcacacctcacgccaccagtttccacaaaactcagtctccctcagaacctcgagccagcagtgcgcaacctcagcagggggattcgcatacaccccacagcccaaagccccgaggactagcatcccatgcccattgaatgccgcaatacgcagtgcttgcctcatcttagatttggtaagtttgcggtccctgtcgcgcgcgaagacttcttgggtacgccgacgggagggcgagggtgaagtcgagcagtggcgtgagctgtggtgtgcgtgtgggctatggccacgtcgctctttctgagaatctttcagcaccactctccggagtataggtcgatagagagcggcgattgtaatcccgctgacaacaggaagatcttctggtggagtagtgggagactctaacaaattgtgtccggaggctaggtcactccgcatgaccagaacgtaggggctgtagatggactcgtctagagcgagcgggtaatccctgctgtggaggctgagcgccagtgagctgcggtagcagatggattcctcttgtgccatcgcgccatttagccagcccccacctggttttcggtagctagcgaagttgataattattgggcgggggttcaggcttggatcgagacgttgtgtccgtgcggactcaaatagtccgacggccacgttgagggtatcgtcgttgatgattttgaccgtcgctggtgatgggaagcgggggcagtcgctggggtgtaagcgtctgaccgaacttgacgataatttcttagatttgtgggcctgattggtggagttgagccggttcagaagaactgagagaacgccgatggtctcctgggccgttcgcctgagggcctgcctttggggacttgcttcggtatcttcgtgatggtgatgggagtgatgacgtgatgtatgccttgggcttgggatgagctgattttcattcaccatgtcccataatcttgacttgatgttttgggaagacatattttctgtcgggtattgctaatttgatgtcggagagagagaactgatcgtatttgaaccagcgctagcgtgcactatacggcacccttctcaccagcggcataccccgggcaggcttaatcgcgtattccttcggtttctcctggaccttccctaaagttcgtgtaatcataaatgcgaggtaacagaataatctcggattaacagaacttaaagactctatccacctacttctagtggtaggctacggaaccccgtatcatggaccagaggttaatcccatactacgacattaatcaatagaaattaatacatttcacgtataactaaataaaggtccgaatttgacaatccggtcggacataattaataagcaagcgcataactcgtcaaagtcacatgcttcggcggtaaaatgaccaatcaaaataacacccctccagggctgtttcttgacagaagtcaaagcaatttatgcaggtcaacgagcttagctgtgttggtattgtttacagtgctgtagcaccgaatcaagggcctagtgctgcggcgggaccggtgctgcagcacttgtcactcatctcggtccccggtgatttgttgggtttaggcagctggtattgctatcgtgggtaaggtagaagggtggcgtattaggattttattgaatatatgaatgactgcattgtactagagagggaaggaggggttatgtgcccccggactatcagagattgatatatattccgatacttcgattataatgtgttattttgctatgccccttcgtaaccacgtacaagtaattactagtaggggatagttattacctcgacctagtggcctagttgttaccatcttcatgattgtctactatatggctctaccgattggcgactatctgtttgcctgcttgatcgtctgcttgctcgcttcctatttgcatttgttatttctttgcttcatagattgtttgctcgttgagtaagaggtccgaggtttgcaacatttgaaaatggtcagctatatcaacaggctgcctcccactgtgcaatgggctacatatggagtgtggttcgtctgatttagtggacggaacatgtcacccgcattcaggaaactagaggcgcaggacgaaggttaccactagtggcttacctgtcttggctttcaatccttatacgaacgcaacgcttgctttgcaggtgccaccaacaaagatggtattctcgacctccagattaccaagttgtcgagccattttcttgatcatcttctctctagttccatataatattatcaaatatagaatattcaccttcaaaacgatgtccaacccaggatatcccagcgcttggaagccgggcaagcccccacgaagcgtggttcgccatcggcggggcccacctctattcaatactctcaccgcgacggcctatgatttgcagcagatgatgattgccggaaccctgaagagtaccgatctggttgaggagtatgttcgaaatattgaggagcacaatgggtatcttcgtgcggtctctgtatatgcgccagttgcgctggaacgggctcaggaattggatgctaagagggaagccggtgaattcttaggcccgcttcatggaatccctgtttttatcaaggtatagcttgtccttttggtcagctcttggtcctttcatttggctgacacaatcagtgggccaagcctggagatgaagacatccacaggagcagtggcgctcctgaatacaaaatccaccaaaaatgcgcaggttgccgacaaggtaatctatttgccccgtcaatagctgtttcgaggtttcaagtctaattattattagctgcttgctgctggagcggttattttgggaaagacaaccatatcagtgggtacccagagagattcaacggagaatccagaacggcacagctaatgcttattcaggagctaagctatcgaaagtaaaattccatcgacgggttttcttcatgtttctttttgtctaacattgttactagaggaaaaggtctcccatgcggttggtctgcagttgacggccaaggacagtccctatattcctgggggattcgatccaaccgattcgatcggagggcatactgtatgttcttattactcgtccctagagcgaggaaaattgctgatacatagcacataggtacccggcggctcatcctcaggagtttccatcgtcatcagtgcaggtcttgctgctaatggagttggaacggataccgatgcctctattaccgccccggcagttagagcgtctctgtatttaattcgaccgactaccggaattgtttcagtaaatggtacagtcccgtgcccaaagacttttgacaccatcggcccaatgggtaggagtgttcgagatgtagcagacctcttgacggctctcgttgagccaggcaagacaaaaaccccacaaggcggttatgcatcctctgctaccaaaaaccatggaaagtcattcaggattggtacgcttgatccagaagtttggaattacccagatttcttagtcaatcccgtgcccgaagctacagagcgaattgtaaggaatcttttccaagtatctatgggttctatatctaacagacttatgcagaaccgaattattctggagacatactccaagattcgtgagggcttggccagtgtctttcatgagaatgccgaccttccccctgtttcagaattcatgctgaacgggaaacattccatctacacctcttgggtatgtcttttcgtgactttacgaactattggttctaatagacgcagatatcgaatgagttgatgttctcaacgactacctcagcgagctgccaggatctcccgtgaagaacttagaggaacttgtgaagtggaatcaggagcacgcagcagaagcactccctaccggtaatctcccatcaggtaactcatagataatctctaattctaacagaatatccgagtcaggatgtgttgatcgaagcactaagcgcgaagctgtcccccgaccagattgagacgctccgtgagcactatttagccgtaggttcaaacatcgacgcagctttacagaataacgaaattgacattactgtcgcccccggagattgctttttgactcaatatgcctcagccaaaggtacgatgttcttcccgactacgtccaactctgttcgacctattgggctgcaggtgattagttctgctcatcgtgaggaccttcttgttgccttcatgagtgcctttgaagattcgatctcgaaaaggtagcccccaactgcgttccttcaggcctcgaaggaatatagcaaacaagctctaccctagcagagaaaaagggaactttgatgaggcttccaaattgactgaacaggcggaagtggagagcatgagaaaggaaagtcagaagcatcgagtcggatgaagagaaggcatatatgagtcatgacatccttatactggtgaaattcgccacaattgtcaggacacaattctatttcgcaaaaatcccctttggttgtttctttctataagcacatacacgccaggcttgtcatagctacgtcggcgtagaagtggtgtgcttatataatattccgtactcggcgctcaggtccggggcgtgctaggaattacccagtgagcaaaaagcggcaagggctagatacctaaaacggaaagagaaagccaagaagtggcagaggaaagagctacgtatgttgtatgccatctcaatatctcaattgtataatggagaacccaaacctcaacgagatccatgatttcctagtctcattggccttcaaggccggggacatcatcaacaatgcactcccagaaatcaccggcacaggatccaaactgaatagtccgtgtccatacaaacaaccgaaaaaggaaaacagctgatatctctaggtgccgacctcgtcacggaatatgaccgcgccgtcgaaaacatgatctcgacctcactgcgggagaaatacccacattacgagtatgtgttttctcttcgtggctgctagcatgcttctgatggtgtgtattctctcagattccacggcgaggaaacgtatgacccggcacgcccattgaccgatgcgcctacgttcgtcgtggaccccatcgatggaacgacgaacttcgtgcatggttttccatttgcctgtgtttcgctcgggttcgctgttggacgcattcccgcggtgggggtggtgtataacccctccaccaaggccctttactccgctattcgaggccagggcgctttcctcaatcgtgaaactcgcttgccgctgaaaggcgaccatgtcgagcccctgtctggactagctaatgctctcgttgccattgaatggggcgcagatcgcagcgggaacaattgggagactaagattcggacgtatgagaagctgggtaagtccaaggaaaatggtggggctatggtgcgcgcaatgcggagtttaggctcggccgcgttgaatttatgtgctgtggctgagggcacgctggatctgtattgggagggtggatgttggtcctgggatgtctgcgccgggtgggttatcctctctgaagccggcggcattatggcggatggaaaccccggggtttgggaagctcgtcttgacgggcggaagtatcttgctgtccgaggttctccaggcggaactggacaaaaggagatcgtggaggagttttggagccatgttcaaggtaaattgaagtattgatcgcccgcccataatcctctcagactagttgaatacgacagacagtagaggtcataattcaaatgtaacattctcataaatacagggtatatgcctaaggaaactgtatgtacaatgaaaccaatggcgctatatgtgacggaaaccagcgttggtcttcacttcgaagccggactcgctgtcatcctcgacaacttcacgatcagtccatcgtgctgaatcctgactcgatacaagatttctgtcacgggtgcctatgtgcgattcatcttcggcccttgagatatcacttgggccagaagatccatctttcgatatatggagatcggatacatttggcaaattgtctgtatctcttattgactttggatcgacaggatcggactgcccttcaacctcgtcaccagagctagtcggaccaacatttggagacttggccatctccatattttgcttcagagaatcgtcggtttccgcagtgagagtgtggctgaagtgtgtatcaaccaagtgcttcacaacaggccagccataggcattggtgaacatgcgccgcacaataatgttattgtgggcatcaggctcaagtcggacaagaaccttacgccaagtcagatcacggtgataggctctcgcgattttttcttcgaccttgaggccgctttctttatctgcaggcggattctgagagtttgattgcttgccctgtggcgaaccaaatgccaatatgcgtcgttttaccggtaaagggggtggtatatcctctgggtggtagatgcggtcgtggaagattgtccggggtcgtgaggcagggtctgaaatgaattccgcgggtggtaaaggcggcatcaacaagtctccagcacactcgaaaaatgttgtctttggaggggtgtgcattccttcgtggtcatggtcatgattaatgggcattgtgctatcgctgtcgccagtctcaaaagtgctcagggtctggctacgcttataaattctagcattcttgctattggggggattcttgttctgagttgggcgaaacagagaaaaaaagctgtccatgggactgtgagaggtatttccagggatgttttctttcagaacaccttcctctgaaactttgttgctggacacatgactggatggtgccaggaattgtgccggcctcggggagattgtatcttcgtcagagacatcgtctttgggccttgggggaaccttggtcgcagaatatgcatgatgatgaccggcctccattgggagattcaaaggcaactctccatcgtggcgagcaagtcgcggggatttcgagttggcgcctgtcaactctgcccacccccattcggccatggttccaacaagtccattgtccctcctcgctttttcaactcgatccaaacctttccagtccaagaacaaaagagaagacgtccgcaaaggaacaatcccatcattcaccacattcgaatagactgtgcggtgctggaatttcttaagaacctcgtaggcaggaccacaaggaagaatccgaagaagtggcttggagccaggatctgaatggccggggtcttttgcagactctcctcttccagcaataatggcaccccagccacttcgaactttcggtgccgtccaactcaacccgagatcttggccggtacgaccaactagacctagatccaatgcaaatcgaacatacattggattctcattgctgagaccaagaaaaggggttgcaagggcaataaagttaacgggtctgatttgctcaaagaactgaggcgagtgcttctggatatatgcgattgcatatgtctgaatcagcccgccaagagaatgggcaatgaaactaatgcttgtaatctggtaagcatggtcttcatcttgaaattcatgggcattttcttgaggggttgattcagccgaatgagaaaatggttcagctcgctccttgcgagcactaaaaggccgggcaaatgggctcggctttgagcctctgagagggaaatagggttgatcgggatatgtgagaagcaggacatatttggccagccgtttgccgaggtattgaatcccacgctcagtccgaacagcattgccagagaaccctctaacaatgacttgctcttcatcgtcatcgtcggagttatcaccagactggctattttgctcttcagtatgactggatttactgctgagaaaattcgggattagaattttgagacacctaaacgttcagaaaggaattccataccttgtcgggttttctcggtctacaacagggctagcatggggatctctggcttgacgtttattcttcttggaatttctcatgcctgtgtcaatgctctccttcaaatagagcatgtctgcaccgaggttgctgtgcaacccatgtgtcagtaacacgagatgcaccttcttctttttggcgcttttcatcggagcttccgtagactcctccggtactggattatcacacacgggttgcgagtcatgactcttccgttcaacgcttttggaagcaggcttcgctgaggggaatggcggactgctccatagactagttgtatcgtcaacttgaagagcgattgattttgagtacacgcctttcgaggcaagcacctgactacctctagttccaggcagccaatggtcttgtaactttgccggaggccctggagagctatttccactactccatgtaccgcccgaggaatatgccagcgacttttcatcacgacccacaagaagctcaaaatgcaccgctgcactacttgagaatatcacctgcgattgaatctcaacaatccagctaacgctatgtccacttgccggtccaccttgacccggagagccaaagtcgtgtgcttcctggaggttagccggcaccttgatgacggcgtcccaaccacctccggccttaaggtagggctcaaactgcggtgtaccctccagatcctgtcgctcatatttggtgttggggtcgaactttgtgggatagcacgcggcgtatagcgtgtacgggccatggaggtatgcggcgcgcagtgggatggcagatgtgttcttcaccctcacgtagagatttgaagggatgggcaggatcgggtcggccgccggagtgtacgtaaccgtgtatctgatggtcggtttactattagcaatccagaaggacttcggactggagaagcaagaacgactcacctaacgacttccccaacacggacactaccaacttgatggattaacaacatgtcggtcggttcctttgtatccaccggaattgtttcccagccggagaaggtatgaaaacgcgacctttgattgctaggctgtgctgcaccttggtctggggtctgggaggccgaataggtgcgcgcagtgatcagcatcgaatctaatgggcagttccattataatcaagcaaattccaaggcgctagataagagagtctagcgagacaacgatatcatttgctggagcaccccatatgctgggatgggtggagtgtggtggtttacggggtccaatctcggagacggcggaaaacacatgatcacattccttttaaggatcgacaactcataggccttgtttatagccatatacaatgctctctttagttctaggctaatacatggtttctatcgcaactgaatgaacctccgcctaattaatcaagttcagcaaacgcctgggttctttagaaatttccatccaaccgttcctttcgacagcgacgatctttccatcaatgcatacgcgtcgccacctctcctcctcttcttgaaaatcgattcgaacctgttcaacatcggcataggtgaccgtgtcttccttcacatgttgaccgccctggtaggctaggatcatcaactgcattgcatcttccgccggcataggaccgaagcggataaatttcatccgtccatccagggccactgagtccggggagatcaagaagtccttctcaagccgtgggacgagtgcagtaagtgcatacatgtgctcaagcccttccactgcttgttggcgtgtctcgttcggaccattcaaggtggttaatgtgattttgcctttgaattggtgaggtggagtaccgtctgagggatgaagtagctcatttgcggccatcttgaaccgatcggctccaaatttgcgatactcggacgtgtcgctgtcggcgactaatgcagcatggagtccccagctcgcaacaacggctccgtataatgtgtgattaacatcggtgtcgatatcggctcgatgacgaccttcatcgatgaccatccggctgccaagtgagaatttggcagcaaagaccggtatagaagatggactgcctcgaagtagtgttgaaagacccggcaccgggccagatcgtaatccaatggaacttgccatggcattccctgtcccgcaaggaatcaacacaatattgggtgatacaccaatcgatgtcttggatttgtagaaaatctcgagaatgtcgatgagggccccgtcgccagaaagaaggatgatagtctgagggacgccattatgagcccgctccaagaatttcgagcgtgcaagctcgatgatggtttcggccgactttgtttcgtagagctcgtaattctctagaccaatatattcaagaagcggctgtacaacatcttgaaagactgtcttggcattcccggttcctgatccagtcgataccacaacctggatgacaggtgtatcttcatgtcgaaggtggcttgggatcttggtcacaaaaggagatagttctgcaggcagggactcgatatcgatctttctcaaggagaagttctcaggcttgtcgccgtccagttcggttttctgaaagaacagcacactatacgtgggtacatgattggacaacacacagagaatgtcgttgaactcaatcaaacactcaacgcctgcgtgagatgtgtatttcaagttgcgatcaactatatcgaccgggaaaggagcagacatctctgatatctctgagtagtagtgtagtgggagagaaatcaacagttccttgagagggcggggttgacggcttacccggactttaagccatgtcgtactacttgggtaaaaagacgacagactttctagcagaaaagtactatgtaactatgtattatttgactgtcgctttgtaaaaattgaaatgcttaactacttggtcaattatttgtcaacatatacataggcaagacacccaaatcaatgattcccattaggtacagtgagggaataagatggttgaactcttatactaccagcaatgactctatatatatgagctaggtatgggcgactgatgggacagtctggtatacaatgtaggaatgcttgtccgatgtggatgcacgttggaatatagaaacgtagatgtccaacgttggacgtaatcaatttgagattgctagtattcttcttgctacattgttctactagatacataatacagatacagcctcgacaagacagaggtacacaagaatcaatgaaatccaaatatgccaatcacgaaataaagcaaaaaaaaggccatcacaaatacaatgttccccgagatatcgacctcagtcctgagttggggaaataccacgtgagggtgtcggtgaagtctcatgagagctatgcttgtcactgaggtttaccgcaatgaaggtcttgggtagttccacactgcatgcagtggtcagtaacaattcagggggttaaggtagcatacaacttacgtgttgaatttcgctttcaacgtctcaatcacctccttccaatcctggtgggctgtcaggcttcggcgcggggtgcagccgatggaatgcctggaatcgagttgcacgtcaagcgggtcgaaggcatgacaaccagggctgactgatatgcggatggagtaagagtaagagtccgattcactgtcccgagcttcgtacagctcaaagcaaatctgagagagataatcgagttctgggatggcactcctagcaatcttagtttggattccaccttccaagatgcagttcaagagagtgtagatatgagattccttggtgaagtagaagaaggatttggcatcctgcgaagcttgcacctcttctagatctcgaacaatttcctgaaggaggggaagagatgttagaaggccaatctcgagtttctcgctgtcggtgattccatattcctggggagtcacgtagtcgaacaaaaccttggctagcttgtatagttcccggagcttcgaaagccgctcatccatcttggacttggtggattgggagccagggaaaagcttgaagtaatgatcgtatgaatcatctagtgcccgaaggtgcggcagtgactcgggggcaaggacgcgtttcttcaaaccaaagcgatgagcaaacgtctggctttcggtgcgatcctcggatttgtcgttcccggcttcctggtcaagtttcccctctgcgcttgcgtctggctttgttacgctattgcttctctgttcttcatcgtagtcacgggtactgtcctgtggcatgaagacccattccaaaaacggtctattgtggagtgcatcgaatttcatactgtcgtatagctcggaaagcttgctcgggtcgaccttctcggtgtcacagaactccgcaaagagcttttcccaccgctccttaaagagtcgaggatcttcgcccgcgcaccagcggccctgtacggtggatatatcaggggaatccactcgatccacggaggttgtttcagggtcattgggtggagtcgggaagatttgcgatgagctgtcgagtttctcaaagttgtgtcgcatgacactccggtggaacttcatcagttcaactaccctagcaaggacaaccgaaggctctgggatatttttgtccttgggccaagcaaattgtgaaggtgcagacccttctcgcaaaagcaatttcagcttcttcttgactttgtccatgacatccttggcggcatttgagtcatcaagcaaatctttccgaacttgaatcaagccttcagggatatccttctgatccaaaaaggagcatgcccatatttgtgctgtgagaatattattagcttgatccagatcatggcaagggaaatgacttaccactagtgctcactctacgttctgagctggtgaatatacgaacgttattcaacgcttccttgttcatcagcttgagatcatcccgcatgttcagtccaagatcctgcgattgataacgcgcggcatgtgtgggctcgccaccccacttgatcacaagctgcagtttgtccaggatcaaatcgttctcggcggcagagaaccgagaaaaagtcgcacctgagatagaatcacttcgtgactgtgatctacgtaaatcctcgttctctggagtgagtccctccccttctttgggcacagttgtagtggactctccatagagcttgcccttcgacaatggagttgaagctctcactggaggttctcccatttcttctggctttcgtttccggaacattggcttgatctgcactttggtaccaggccaacctccctttttgtctaaagatgcgcggagcaacttgagcttctccttgtcttctaagcccttctccatagccaccttgacggcatcagaaacactggccaatgcggtttcccccttaatcactatctcattctggtgccctttcagcaagtcaacgaaaggttggctgtggaaagtgaacttgaacttttgctttggggtccgatctgcgtgtcgaatcactgccaccatgcccttcagcttccaagagtgtttagaagcaggaagaggcggaagggcttcgtcattggcgtgctgtaccgaaagagccggcgattttgtgttcgagggaccatgattagaggagtagccttcccgggaattcagcttgctgagagcagcgccaatatcagcactctctaccccagatgacgccagtgatggacgacgtgactctgaaacctcggtgggtttctgggtttggccgtaaagcctggagttgctaggagacttcagcaatgtctttagagcttggcgatgagatcctgccgtgctccttctggatgagcctaaatccggtgatggcggctcggaggattccgatatcccttcgcatttgcgtctttcttctaggaaaatatccctgaggatgttggcacacttatcgtaataatcattgttgtccttgacgaagctccagccgttgacgtcaatgacatagcttttatctcccacgcggagcatgtcaaagccacagattctttgaccaaatccatttgaaatcttcgatgcgattattgcctcctccttgccaagttttgtgatgtatcgtatttccttcccgtgggtattgcgccgaacgagaccgtcgacgacgggagacttgcgcgtctctgcgtgacaaaagtttggcccaacggtgtaggctttgacatcttccgcattgtcaaccctgaggaactgctcgtatagataactagcgtccttctcggtgatggatcttggaacagtgagattgggatcatattccgaacttttgttgccgacctttcggaatagtcttcttccacctccgccgtaatgttcatcgttggggaaatagatgtgaatgttgtggtcctcgccattgacaggcttttcaacaaagggctttttgaacactttgccatcaacaatcaaggcctcgccatcctcggacattgagacgttctgagtcagaggagcaccaccaccaattccgttctctgggccttcgagcttgaccccagtcaggtgatagatatgctgggccagctctggcgattctagaaccggaccgccatcacggttgacctctatccgcttcggggtgggaacacccatgtgatccagaatcatcaggcagagccgccgatcccacaggaccttttgcataggcaggtcattaacacatagcggttttcgaagcttagcatacgcaatggctttgtccagggggaatccatcggaaaagaaagcgagcaagaagtcacacacaggccaattctcgactgcttcatcgaggataactttgtctccaaaaacaatcacctcaaattcgcctttcgattgcagtcgagtcaagatattctggctcggtttgctacgtgctttcacatccaaggcacagactccgatcctccatggcttgagggagccagattccgcctcatagatcgagcttgcagcggtactggcagctgtgcttccactgaaccttctaggtgcatggcttaaggggcgtgtagattgtcccatccgactgccggagcgaggatcaaagcccgaatcggcttttcctgattgattttgtgtcgattttgtgtgtgacgtaggcttagtcgaagccaatgggggttcgaggacgggccctgtgggcgtctgatcgttgtaatcggagtccatatcaagtaaaggcgacgaaaggttgggttctgcaggtctcaagggttcagcaccggctgaagagccgttgctgtgctcagcggcattatccatatgaggggtcaattgtctgtataggattgggttttagatcaattaaatcgtatgagactaattttgatcaatgagatggggattttaaggaagcacaaaatctttggtagcagttcggagaaagaagcgcagatcgagcctggaagctcttggattccaaggttgtattaccaaatatgattggcctcccgcatgggcgacttttcgctggtctaagtttgtatattttcgctcataatcagactagagggctgggaaatggtatgtttattgtgtattcgaatcactgggcttcctcgtattcctataaagtacttataatatatctaaaagtacatatgcccctacccaggtacttattgtagaagtcttcactacatgataacacattttgatagcattttggctatacagagcagtgtcggataagattgttgatgcatttgtgtttgagaatacaatgatttgaacatatgtaacaacgaagagtgacgttaagttaaagatatcaaagagatattccggatatgctcatcacgtgaaggtattttatacccggggaagatgttcacccgtttgaaggcggtctagtgcctgcaggactaggcggggcagaaaaaaacatcaaaaaaaaaagaagaccgagctagtgaagacgacggagataccctttgtgacttgatcaccaagtcagaacggaattatcactccaaaggctaaggggcttattctgattactttggatcctacggcatatccattgtcgttagtgtgtccctcgatatcatgccttcttcggccgataatttcgatctgcctcttgcgaagaggcagaaacgggtatcacaggttaaggctgggacacatggttccaagatctttgctcctttccgtgtaagttgggggagacattaaatcgcttcttttctccaaactgacatgtcgctataaagacactaggattggtgtcgccaacacccgttccctttacgtcagtgcgcctgggtaaatcgacctttcaaatcacaacctccgtgggacactcgctgcagacttatgatttgcgccgaggtctgaacctcatctttctgagtcgaccgcaaacaccagagatcattacggcaacatgtgcgtggcaggataaggtattcgcagcttggggccatctccggtcgcagtccccaggaggcgtctgggttttcaagcgcggcaaaagagttgcagttcttgagggccccgcagacctgaaggggcccattgagcgcttggtggtgtttggctcatgggtggttggttgctggaccggtggcctcgaggtttggagaacgggcacatacgagcactatgccagtctgcggccacaacccgctcggggttcctctggagagaagatctacactggggtaatgtgcaacatgccgacttacctgaacaagatattcgtgggccgatcagatggagcggttgatatctggaacctccgtagtggaaagcttcttcacacgttgccctccttgtcggcagatgctgggcccgtgactgcgattcaacccacacctgctctatcgcttgttgccattgcctataagggcggtgcgttggctattcagaacgtgagctcaggccagctggttttgtctctcaagaacgcatcatcccggggtctcccagtaacttccatcaccttccgcggcgacggattgggtgctggtcacgatggtcgcagctcaggtgttatggccacagcgtcaagtggtagcggcgatatcacactctgggacttgaataatggaggtcgcattgcaggcattcttcgtggagcccatcgagtgtcaagcggcgaaaagcccatgggcgccaaccgtgtcgagttcttggatggacagccagtgatcgtgtcatcgggcgatgacaattctttgaagacttggatcttcgacgagacgccgttctcgcccattccccgacctcttcataggagaaacggacactctgctgccgtcagcgctcttgatttcctgccgacgtcttcggatggatccgagtctggcggcaagtggcttcttagtgcaagcaaggattgcagtctctgggggcttagtctacgcaaagacagccagcataccgagatctcgcagggtagcttggaacgcaaggctaagaaggcagggccatcgaacatctcaaatacagaggatctcaaagctcccgaagttacatgcattgcctgcagcctcaaccgtgatggtggaatgggagtcaccacttccggtccgatctggtcgaacccgaaggttacaaacgccgatgcttccaacgcaaccggctgggaaagcgtggttaccggtcatcggggcgacaagttcgcacgtacttggttctggggcaaaaagagagcaggtcgatgggcgtttgcaaccagtgatggaacagaagtcaaggtgtgcaaattcttaaacatgactgaacaattgttttcctttgctaattcattcctcagagtgtgaccgtttcgcaatgtggtactttcgctgtcatcggatcagctgggggttctatcgacatgttcaacatgcagtcaggtctacaccgacaaagtttcccagctcgtcccccagctggccgtggtaccaaatccaatgctcagacctcgatcactgaggctactagacacaccaaggctgtgactggtttgatgattgacaacttgaaccgtaccgttgtcagctgtggcctggatggcaaagtcaaggtacaccccaccactccctcttttctagagattcgcaaactgacattttctggaatatagttttgggatcttctttctgggaaattcattgatgaactagactggcatcccatggctgccattactggacttcgctataacaaggcgagtgaattagtcgccttcagctgtgacgacctctcgatccgtgtgattgacctcgagaccagaaagctcgttcgtgaattctggggatgtgtgggtcaagtcaatgatttcatcttctcaaatgatggacgatggattattgctgcctccatggactcggtgatacgcgtatgggatatgcccaccgggcatttgattgacatcttccgcgtctcaagcacatgtgtcgctctgtccatgtcttcaacgggtgaattccttgctaccgcacacgccggtagcattggtatcagcctttggagcaaccgcagccttttcatgccgatctcgaccaaaaacctggacgagaacattattgagaacgttgggcttccggcaacatcgggagaaggtggtgctggtcttattgaggccgccttcgtggatactaccgagcaagatgaggcagaaggcccagtactggccacggaacaactacaacacgacatgatgactctgagtcttgtccctaaaagcagatggcagtcattgattcacctagacactatacgggtatgtttctatctctgcacgggtatgatctctagctaacagttcaataggaacgtaatcgccccaaggaagcccccaaggcacccgagaaggctccgttctttcttccttctctgctcagttccagtggtcccgaggccggcgaaatcgccggcgccgaggataccgatgctggatcgatggtcaaaaccgccgaagccgaaaggttgcggattgccaagttgcaaaatggtggaaaccccggttctcctcaatctattttcacccgatcattggcatccggccatgattccggtgacttcagctcatttatcgaccatctcaagaccttatctccggccaaagcagatctcgagattcgttctctggatcctcgggtgcgtgatggacactctgagttgtccgatttcgttattgccctgactgctcgcctgaagtcaaagagggactttgagcttgtcaatgcttggatggcggtctttttgaaaattcacgccgatactgtgagtctcagctctactcaagatgagcctcggtatcgtctattgcaagatgctcttgcaatttggtctgacgagcaacggcgggagggaaagcgcctggctgagctggtgggctactgtcgcggagtggtcggattcttgcgatctgctcggtaatttgaaatggacagatctatacttatgtacttactggataaatatctcgggacatgagtgcctttttttctttgttatctatcacgcgtgttacgttgaatctatatgcatttgttctataaatccagtgattttgcaggaatttagggaacttctgcatcctatctactttgttatcatcttattttatttccgcaccttctaattctattcatatatctcaatttaaggaaagatgagatcaatattccaagttttctaggttgtccaaacttggacctccggcgtcttaccaccctgactaatacggatttttttttttcgagaaacaatccacaaccacgacaagaagggttcttccacgcattggctatggggatcccccatttaactaggcacttactgccatatgccgaaagcgtcttgttagatgggagggcgatcgattcagaacttccgcacatccaagccgttgtcattgacgggcccagcctagtataccatgtctaccgtcgactcctgggctggatggacccaagcagtgatgtccttgactaccagccaacctgcgacgaaatcagtcgcggggtgagcagcttccttctccaattaaccagaatgggagttaaaatgtaagcgctcacaactagtccgaaacacagctatcctctgattatcattttcctttctctctctgtcctttagacataagatatgcttcgatggtgccttgcctatctccaagcgaaaaatccgcttttccagaattgaaaagttaagacatcgactagaattggctcgtcgaaatttgtctctgcctgctacgcccaaatgtcgcgatgtgattccgactgaacgagggcaggtctggtgcagtcgaggcttgccccagcgacgaaaaggccttccagagaatcctttcatggtaccggcggtcttcgaggacctgctgaaccgatggagcaaggaacagatccggaaagaggttgacgatgatatcagttgccttgtcaccgatgtcaatcacccctgggcggaaatcactgtcatggtgccaggagaagcagatgttgagtgtgcccgtgtggcaaaacttaccggctgttcagtgttgacggatgattcggatctgctgcttcacgaccttggtcaggatggctcgctcttgtttctagactcggttcaaacgtcctcgggcgtctgggatccggccgagccagatattcgggggctgaggatctgtccccattcgctctctggccgattgggcatcccaagcgttcagtggtttgcttacgaattgcaaaaaaatgcccacctgcgttttgctgaacttacccggatatctcaggagagcagtaaggcgactgagctctcctctgaatatctggagtttcttcaagaatatcatgacgataccactgataacgcggtgatacctggagcagagcagtccgtacaactgttggatccgagggtatcggagttattttggcagtatgaacttcctagtatttactgctcggatgaacagccacacgtctatctcgggattttgaacgaagatttttccagacgatgtgcctgggaacaaggtcgaacatataggtcccttgggtactcatttttcaacctttcccgtcttgttgtcaatcgatacgcagtcgtacatgaattcgttcgcaggggtggaaggatcgtggccgaggagatcactttaagcggaacaaagaccgtgatctccgacctggatcttctccagaaacgtcttgcgctagcacacgctacctttgacgacggtctggcagcggagagcttctggtttttgtatgctctttccgatatttatcgtgatggatccggtacaaccacagttccaaatgcgaaggggttggagagctttcttaaaaatggatatatggcgcgaagtaccgaatgggcggatattcaccttcttgctcaaatgcaagctgcactgtactctttacgaatactgaagcagctgctcgatatcgcaactcctggtcttgacttggttgataccagctcactactcgcggatttacctccactacacataatgatgtcgcgacagaagatgacccagagctttgccaacactcgtcttgtccggcatgcggtttctaaattgatagaaacgtatggttaacaaatacaaatctacattgcaaacatgcactagtacttcacgaattagagacccctcaggtaatgactattatcagctaaggattcggcattcatgcggtttgtagattacaatgacatttgcattggcggtcgccatagacatagaagacataaatgtgccacttgataaccttgcctgagaagccccgggtccttcaaatgattcattccattggcatataggttttaaagtactagaaccagccctgggaggagcgatgctgctggttctcgatccagtcgttttgtttgatcggatacggtcgattgacagaataatcttgtcttgcggtcgtgcgtgttgtggttgcctggtgtctggaggcgaaaattgttcaagttattttacaactttctggcgaagaaagaaacggatatttttgtgggtatcatgtagatggtcgcaatagcgacagacgattggataaattgtttcaagttgctcatttttcgggggcatcgggaagtcgttcaataacatatttgccgcgagcgacactcatgatgggtgctccaggaatcttgctattatggttgttagaatttggctggtacagcgaaaatgagatcgatgtgtaggttacataccgaatccgtctcttaagatcacgatcgtttgtggcgataatgtagacacgatgtttgatgacacgatcgaccagacagtcatcggcatatgttcccttgtggtcacacttgacgcgctcgaaccgagggtctttggctacacgcagtgcaagtcggtatttcgggccaagcttctccaactcggcaagtacgcaatctgtgacgataggaatacatttggcgtacaaacagtcaagcatggtaggaatgacctcaagtttgtgctgaatggtgtgggaaatgaaattggtatcgaccagcacggagtatgggggagcgagggccgtgttgaactggaagaacattgacgaaggagcttgggggctaagagcgaacttgtcagtacgattattgcgatagtactatatgatgcacttacgcctccttgacgaggtcatccttcttagcctcttgacctttctctgtcttgtcttgattttgcttcctataaccgactgttagcaagtcgcaagaagatcatgtttcgtgattatgacgaacaggcgattgtcgcgcatggtaatggctctcttggccagcgcatacttgcgagtctttttctgaactcccatgatgacgagatgtggatgataatagtgaggaagaggttttttttctcttttcttatcggggaaatctatctcgggttcgggatgactaatcgtgtcgatgggctctgggcatcccccacggacaatcttgtcttcaaaactcccgtgtactcagcaataacctcaaacattcattatgtcgggagcggattcggactttgatctgtcgaaggtaagtccctacctcggcgttcgcaagcaacatatatttccctaaactatgctgctagacagcgttgtccctgttgcattccattccctctaccaacgatccaaggtcggacagctaatccaatatataggcacttgcagaacttgcaaagtacgtgagaccacttatagcttacatcaataaattcatgagattgacatcatatatttaggggtgaaatgactgcctcggccctggaaaaccatctgagcgcaattgaaagccaagtcgatgaactcttggcatctttcgaaaagcaggcggctgctgcagtggaggctacgtctgtcgatgaaacagacccgagtcaaccggaaacagatcaggatcaaaaagtagagccatcgaatagtccagccaagtgaaacttgccatcgcctaacttctctgcaactccaacctctgtgataatcccatctatcaaactcgcgggagtaatgtcaaatgccgggttccagacattgatccctggcgcagcaattttcacggtctcaatcacaatctggtcggtggcctcagaacccgcacggggacctttaatgctggtcacttcagatgctgcacgttgctcaatgacaatgtctctccctgatttcgttgccatatcgattgttgtgagcggcgctgcaacgaggaacttaacgccatggtactttgccaagacagcgagaccatatgtgccaatcttgttggctgtgtcaccatttgctgctaccctatcagctcccaccacaattgcattcactctcactttggtatctgcgagcaaagcggctgccatggaatccgtgatgagtgtagccggaatttcgtcgtgaaccaactcgaatgctgtaaggcgagacccttggttgtagggcctggtctctgtgcaataagcgtgagttaggaggctcttctcggccagcgaacgaaccacacccaatgcggtgccatatccagaagtggcgagagagctagtgattcgggattagtgagaacatacgacggataacggataatgtagcgaatcggccttacccagtgttgcagtgggtcaatacagtaatcattgaattccctctggacgcacgaacggcgatccattctgcgccattgtgtccaattttcttgttatcctcgaggtcttttcccatcatatcctctgccgcctgaataaaggcggccccggcctcccgggccggannnnnnnnnnnnnnnnnnnnnnnnnnnnnnnnnnnnnnnnnnnnnnnnnnnnnnnnnnnnnnnnnnnnnnnnnnnnnnnnnnnnnnnnnnnnnnnnnnnnnnnnnnnnnnnnnnnnnnnnnnnnnnnnnnnnnnnnnnnnnnnnnnnnnnnnnnnnngttttctttccccgccaccccccccgccgcaaaaaaagggggggccgcgacttcgcggccagtagagcccggtgctttcgtgcggttgaccactacagcctccagcttgcgcgcagcatcagcgagattgacggcagtcggcctactcgtcaccagataagcaagcttctctgtgatatattggcacacctcttctggtgattgtgaaagcttgtcgctgtccacagcagaggttagctccgaagcgagagcaagcattgcgacgatcgcaatagcaggtgcccctcggactttcatatctttgatggcgtgccatccatcttctgtagtccggatgggaatgtattcttcgacaaatggaagctgcaattgatccaggatctcaaggttgcccttgctatacttgattgcctgtaacatcttcgtaggtgacggtcaaaggttttaaagaccttggtgaggcgcgaagaaagaaccttaaaaagtccgcgggggactttggaaagcttacttaagcaatgcggggggtaactaactacaacaggtacaatagttaagaggtacaaccttcccaggaacgaggaacgtacctctaacgtatgtagttaaggtaaccaagccaggtaggatcaaatgccatggattactgtgcgaatatactctgcaccgattaaacatgaggtcaatggcacatcgccacatcgccagaaaacttatcaagccgcctaggaaacaaataacgagctcatggtcaccagcgccaatgttgagctcaatacaaagcaggggaaaaaaacccccctaggtacgtagccttcataaccctaggctcgcaagtatggccaactgcatcataagaagagttggtcaatcaccacctaggcttatattctgtcctcctagctagaatgttccaaatcattgcgacgacactcaaatggtgtctttcttatccacttgcaggttgtcataggtgggcccaatcgataacatcgaatgtgtattgtgggatcagctggaagagatgtagagtactgtaggctctagtcagaaagctgtcgcactagccataggattggaagacaagaaaggattgacaaaccgttgtttccgcgcacgaaagcatccccgtagtttcgtcgtagttttccattcacgtattcttcagtcttttcaagggcaatgttcatgtagccatcaactgattgcagttcacctattggcgcattagaagcgaggccactaggaacaagagaaaagtccatacccttgtataccactccagaattcagcttcacgatcacaggcgcaccgatgatctcactcagaaagacagaagggtctttcccttcagaggttgcggcgttctccatattgatactgtggtctgaactttatcaaatgtcagccagagctaagttccatgggaaaagggaagacgtaccaggttgagatgtgttttgaagcagacggagggacgaagcattcgaaagcaagagaccagtaaggcggtgagtgatgcactatcacaagcggggcgggatctgctgatcagttttcgaagaagatcggacaccgccattgtattttgccggtattgccggtcataaaatagtatactttctattcgctttgcaaacatcatccaaaatattgaaatagttgaatttggcaaactatgtgctagcatagctatttgaggctaatctgtaactaataaatcaagaggaaagaggtcttatatagtcaaatattccgttaatcagaaagcatgctagtgtacctttattaggcggtaagcaggacggtgtcttgacccactataggctagaaagtgtgatagcatgttccctccatcttgactaccaattgtttggcttatgcccggccctcgtgtcgcacatcttactctatcactaacatatcgctgattataataaggtgcttcccgagtcacttctaaaatccattcggccatcctaccatacttggatcttttgagggactcatgagctttttcaaaaagccctcatgggcaataaagaatatggaggaaactggcactgaattttatcgacgctcagaacaaacgtactctgatatcattgctgcgaatcgtgaagcacgccacaagccgaaatcaccggagatcccagaacataccgaagatactcaagataccggggatattgaagactcaaaacgaaagaggcggcgtcggcactctagtgaaaggggaaaggggcgcaatgatagcagtccggtgcaaaatgtggcccgtgaggttgataaacttgtgctaccggagccacaagagctctcgggttcctcgcatgattcctcacccgaatcagtcaagccagtcaaacaaagcgaaccaacacagaaaagcagcccaggaaagcgcttgtcccagtcaccgcacaaagtcagtggtccggaaccactaggtgctctgcctgttcaaccagtgattgtcctagcggatgattcggaaactcgaacccctcgacctgttgaacctcctaggcctgttcaaccttcacctcggcctgttcaaccggcggaagttccagcggatgacccgattgtccaaatcatgatcacatccgaaattgcgaacaccaaaccattactcgtccatcgaaaaatgtcacagcggctcagggatgtgcggttggcatggtgcagtcgccaaaatttcgaaccccatatacaggcatcaatctacctgacctggaagggccgacgtctattcgacgtgacaacttgcaggagtctaaatataaataccaggaagaactctgcagcgatccctggcattgatgatgacgactttgcagaccagaaagagctgcgcatacatatggaagcggttaccgatttacctctcccggtcaatcagcaaattacctcgcctgataatgaaaagccccctacagcgtcacagtccccaggagctgaccagggcgagccaatgaaacttattttgaggagtcttgaacacgacgatttcagaatcaaagcaaggtcgaaaaccctgatctcgcgacttatatcggctttccgggagaaacagaatattcctgtggacaacgacatctttctcttgtttgatggggacaaactcgatcccaattcatgtcttggcgactacgacattgacgatctagatctgctggatgtccaaatcaaataaccctcctcgaaggatctgaacaactgaataatagctaatccgggctaatcaaagctaataaaatcttccagtctgactctagggaatttctgtaaagataatgtatatacggagcacaatttcagagtaaacatcaacttagtatagtagtggacctatccatatcgatcacatgatatcagataagccgtgggactctttttttttctccctcggaggggccatcgacgatgttcattatccgctaaattaatctcctgtctagacccaatcgatctttacatacctgagcaacattctcagaatattcgcatcgacaaaccaccaacaatcaccctccaaaacccccacaatgaaagtgatcaccgccaatttcgtgacatgcgccgtgaaggaatgcaagacatccccggcctcattcccattacatttccaagacgccgagctcgagcaacaagaactagacttccagcccgaattcatccgcaacgttctcccccgaattgactgggaagccctgcgcaccgtttccaacgaggtatgaagatccgacacccaagtttacctattcaaccgatatacctatacatacgtgtaggtaattcaccgacaattacaaataagctgactcttgcggtcttatttcagcttggattcccgagtcttccagattcgaaacctgagggcgaggctctcgacaacgagcagacattgaaggacttgcatcggttgcttcttgagacgcatgtcacggaagggaaattgacctgtgggaactgtggtcattcatatatgattaaggagggaattgcgaacttccttcttccaagccaccttggtgagaaatcttcttttcccttgggtatgttcgtttgctaatattcctccagtctgaacgacacaatcccacatgcgcttttcaccaaaatagcttcgcaaatcgataccccaggactaggaatggtcttccttcctttcctttcccttctctgaaagaccctatgcagtggcacgaaggttatcagatatccaaatcgggttcttctgggatttgacacatctacgctctcacatctcctaagactgtgctccagcgccatgacttgaaacggaaaacaggcgaaattcttttggaattggtatattgtacaagagagttcgtagtttatgaaatcacgattgccattgataaatgcgtcaatgctcccacactgaaaacgccagcccgattcaacgccgcccggtaaatgggagtcaatatacctcccaaagactttggtagatagatctcggaaagcgttttttaattaaggaatcccttgcagcccgttgaaccacagagacaggggatgcggtcatcgctgtcccactctctctcgaatttgtagtcgtacgttaactcctcatctaatagcttttgttagcatttgtcttttcctgcaaagcccgcgcgggtcacaaacctctttcaatatccctgagcgcataaatcacaatccgtttgctaccatctaccttaatgatcttggcggtgcagtttggtgtacagctgtgattgatgaatcgcgcaattcctcctctctttgtggcatcgatgacggtattctcgtcgattcggaaaagataactgctgccgatcccgctctttaggtatcgtctttctctcatgtcggcgacctgctgacgcactttctctccgacgtactcaatgatcatgtcattggcagtgatgttttcttcggcatacaagccccaattatgaatggcagagcgagcgaagcgcacaggcttcttgcgtttcttaagctgattgaatcgaagaacgtctccttcgccgttcgcggtgggaagggcctgcttttgtgcattgatgtctgcaatgagccggcggttgttgactcgggttgaccgggatgtcgattttgagattgttttggcggctgcaatcctggcagcctcagctgccgctgcctgggggtctgctttggcatttgcttcacgctcttctcgagccttctgaaccttgatccgatggggcaggtatttggatttttctgcctcgagaatcctttttcggccttccgtccgcgcagcgcctgtggtatttggcacataatagccagggatactgatagcgtcctgggtcgtaccagtttccaggccattgagagctttgatctccttttgtttccaaccccatgcagcaagattttggataattgattctgactgatccagtaggatttcccgcaaaaatcgcaggtcttcatcatccttgaccaggttttgccaaccatccaaatcaagcacgatgttttcatcatcttccaccgtggcgcggggctcatccttggaaactgcccattcgatctctgttctcggctcatcgataggttcggccttccccgtttcgctgatcgagaggtcatcatcctcgggatgtttgtaggggacattctcggtgaattggtctgcgggttgatcgtgcgttggtaatttgtcgtcatcctctgcgagatcgtcatcaatagccgcgggcgtttctagctcctcagtcgcatcctcatatccgagtatttccgagtcaatgccaaacagctcttcctcctgtcgctgccgctttcgtgcttcttcctcttctgtcagtcgctttctcttgcctgacgtgggagacacctgaagttcgtgggaaagatcgctggtttcatttgtggcatccaggtcgtccgcaagttgagcgctgcgtgatgatcccagatcatccgactggtatcccccatcccgttcaaactccgatgacgttgaactttcgcgactagggggacggctctctcgctcatcggcatccctagtagcaggagtgcgctgctcgtcgtccgaatcttcatcatcgtgcagctgctgtaaacgatgatataagggccggacttctttctttcgaagcggttgcctacgccgttcgtctaggaaggcagcacccgcatggtcaagaccatgggctttacggatacgaggaagagcaaggacattcagacctgatgatctgaggggatctcgcccggcggacatttcgcctcgagagccaggggtgctgtcgatttggaaaacagatcgctttgtaccctcggggtctgaaatacccagcctttcccttttagccgcatgtttactcggttccaaatagtcgtaaagagccggagcagctatgcgtgacttcacatcctcgaggagcttgtccctcaagtcacgaatgatgatagacaatacttctcggcaaggatctaaatcaagcgcccgctgctttttttcttcttcaagatccaattcatcctctttctttgtccgatctttttcggccttgtttcgttgttcggtgcgaagtcgttcggggctgggactccgttcgtagtttggattcccgtagggctggctctccatattcatgatgtaggtgaacaagggttgcatgtgacattgtcggtagcagcgttcagtttcctcctcgccccggcgcgagttctcgaagatgatatagtagccggttttgtcacaacggatatgcttgtatccaaagagtctgagtctctttctcaggtgcggaaccgttgtgctgagaactgggacataacaatgcgcaatgaaaatgtatggatcgcgtttgatctgattcaagataggagtttcttcgaccaatgattgtatgacaggggatcgtgcagcggccctaggaccctctgggataacgagccccggccgtagggatgatctgcccgagggacctttgggcgcagtcggtggtggttcgcttttctttatctggacatccggtctcggttcgattgcgggaggaaggctaatcttggaagcctgtcgctgggactcgactgctttcgcggccattcgatttgagacaaccccgtcgcgatccagctccaccctaatcctgcgcgtgccaatgcgttgttcttttttgcattcgaaatatgcacgtcgggctgcgctagatgctgacgctgacccatttccccgagctgaggtgctatctttgtatttgatggagcagatccccagaaaccggccggtgatggggtctgtgcggtttttgatttcggccacatctccaaagctcgagaaaagtgcgctgatcggggcaatcggggtcaaagggtcgaatcccgtcaccacgacctgaatcggaggcccgggaccaatgctggttgccacatcgtatgaccatggtcgcagattgtaaggcgcgggtcggtattttgtcttctgcttgcagccggatccacgggtataattggcaatcgcacgacgaggatcgggtgcgggatcggcttggccattattcacgatgtccacatactcgagctttttccgcttttcctttgacgaggtccgcttgtccagatcggggtcgtagacaaccttgcagcctgtcacacggagctcgacgtgtcgagtttgcgactgaggggtaggaggggtgtctattggggtgatggaaggtttggtgacatcaggattcggcctggaagaagtgcccggagagcctccgcctggtatctttggctgtgatggactggttactttgcaaaggggcgatgactccgcattggtgagcggtgtcagcgtatcgattggtgggacgtgatttgccgtgggtggtggaggtagcccaatcctatcctctgcgcttttcgccttggcgaaaatggtcaatccaagctcgttgggaaccgatggagtgcgagctcccccctcgtctgtatcaattttgacgggcgtctcaacgggcgcgggggtgctcgaggcaagagacactagacgatccggagtcttttcggaaatttgatcaccctcgacatgtaatttccggcgttcctgcgctgttttgaagcgcttctgttgaaggacagatggtgcggtggggaagaagtctgcaaagccggccgaggcgcgtgacatagtgagaggttggctacacgccagagaccgtggcgcgatcagaaggcagcatccttgacagtcgtgatccggctattgcgaacacatgcgaccgagaaggtcccggcacggcagaattgaggaaattgagatgaaggggcttttacagaagtgccaatgtcaaagaagggatgagaaaacaaaagagatgacaagaaaaagggagaccgaaaagcgatatccaggagctgttgaatctgcggaggtgccgttacgcgcaactcaagagtttgcaggaggctaagacgcgatcgagcggaaggaagtggaatggtggggacgcgggagtttgaacttcacgctttcaagggatatgaactcctgtaaggaaagaaagaaaaggacgtgaaatagatcgaatatgattaggtatgatgtggtgaagttcaagttcaagttccccgggggccgtttagtgactgaatgattcagcaattcttttttttttggccttgaaaggatccccagtgacctcaccgcgacttaataactcactacaataacgcccacagttgaggtacctagtaagtatctttgggcactcattggggaaatcattgatctttcattatcttattgctattggagatgattgttaatagtagccttggtattgatctcgtcaataggttgtactaaaaacaagcccaaaattcatgtcttgaatggttccatagtctgataataggggattcttgcttgcaccctcacaaccccccctgcctgaaatttcagtaccgccttcctaatttggttgagcatctgcctcgacactttgcttctgcataccgctctcctcaccgcctcctcatatctacgccgcttttgtatcaaactgcataggatagtagcaagacagcaggtacgtatggtttgtatgtaaactcctaataaaattcagtcactcatacatgtaagccagaagtgggcagaatacgtagctgaaaaaataaattatggcagaaatatggcagaattctgagtggtacctgatcaggaaggcggtccagggatttcatgcgagcaacaattcccgatatatatacggagtacgtttgaacatgtatcggattcgaatatagagtagtatacataatacaacatatatccctgcgtatgtctcggactttgccgcttttattagggtcatcctacctcttcttccgcctacgaacagagaaagcggtgagaggtgaccctaaaattaagcatggctcccccacccaactttctcccttcaaccagtcacactcatccatcatcaacgaattgcacgcatccatcatcaactagtcgcgctcatccactgtcacagctgattcggacgccgtacttttactggaactgccacaccctccagactgggcccaagcgcactccaacctgaccccaagcgcacttcaacctaggtaattgacagaatgtcattatctatgacagtaagtccttctgtgccttctagtattttcgatactaataatcaagctaggagctgaatcgaaagttgaatggttacgtaccacttaagcctacggacagaaccaagtactttctccgtgacttttataagacccttcctcctgatggaaaagaaaatctggcgcaggatatttcagggtgtgaaaacgatgagacacttcggcaactcgtccaaagtattcggactggtttgctggttcccttgaaagcacagggtggtaaaacacccactgaaatcactccgtctccgcgttctggtattgaagattcaatcgaggatcttaagagccaaaacatcgaacctattagcagaagttatcagtcgcaactccggaaccactgtttagaaagagatggtaataaatgtcttgcaacggggatgtacagtcaggcccatgcctacccaccgaacgtacttacgacctcccttgaagcagctcatattattccatttgcatttggatcctttcaggccaataacagcgagtcagtggatcgaaatacgaagatctgggtcaacctaagacgctacttcccagctcttcgtaacatgtccttcaccccagaacagattaattcagaaaagaatatcctaatgctagacgccgaaattcataaggaattcggacaattcagaattatctttgaagcgaccggagttactcatcaatatcggatcaagaccttttcgggcatcagcacaaggacattgagagatttacctcaaagtcggcttgtctatttcacagttcataatggaagttgggaacttccagatcctcaaattctcgaaatgcatgcttgcattggaaaattcctacatatgagtggccaggcggaggtgatcgacaagatcctagaagattttgcagactgtggtgggcttgccccgagtggaagcaccaatatcgcagaccttcttgcagtgagctgcctcgcagtcctatgttgaagtcgttcaacttttcagtcacaatccacttgcttcattgtgtactcccaatgccggtctcccaccgattctccttgtctgcctcggtcttaccacgagagaagaattccgttaatattgatacttgttcatcctcaatttcgatgttatttttaatggcggacaccagagacgtgacatgctacatttgatgaagaaccatttgcccaaccgaggtggaaagcaaaacagttatttgtacttcctccttttacacatcaagtacacctaagatctccattatgaccagataaatcctatcctatcttccccaatcaattctatgtccgtgctttgacagccatccaacgggcctagtctctcttggaagcagaatctagagctcccagatctgcgtcctctactccgtatatagagaacaaacccacatctagacggcaaacggtcatccggggaaagcgttatctatacagtggtcgaaggaatatgaattcagatagggcttgcgttatatattatgacttcaggggaaatctaggcgctcggtccatgtggacagttccacgaaagatacagaagtggatggctgatggagtagaataaatgtccacttcgccgagagaaatggctttagtcgataggcgtatagaggcatatatcattgtttttcgtggaggggtattttgcagccgagagacatataactacatatggtttcatgtagaaggcatgttgtcagaagtacataaacagatcttcaatgcactgcaatgtggcgggagaggaaaacgaggtggagttcagggaagacgaggaagatgcttccatatccaatcatgtacctaggtcatcgaagtcggaagagatcttctggtgggcccatagtgccctcaagccgactgcaagactgagctgtacggagtagttagttagtctttatcatgagccaattcccgttttttcttggactggatattgaactcgtcaaattggaagggctttacaggcataagttataatcaaaaattattccaattttcaaagagagccaacttttttgcggttccaaggtcggatataccgccacattatgtaagacgccagccagcctccgttacaacacagttaactaaggatgttagtatgaactagcgtgtggtgagcactatgtcaaagttccaggctaatctcggacttagtgagtgagccctgtcatagaaatccatggaacgattggaaccaacgagaatattcgttgaggagagatgcttgaggagaataataccccataccgcgcttatggggacttccaaatccgggtgcccgagtatcaggtgattccctacgtccatggatcatcgtcagtgagcccggcgagttcaaggcttatgtaagaatcaggggtctcagcaaggggaaggggaagcgaaaaccggaatatgcacaacgatgtaattaaatatgtatggagtagatatgatgttatggcggggaatatagttatcattcaagcctcctagtactatttacatagttatagcactgcatcagccctgcctcttttttttttctcctcgcttgtatgaggctgatatctcagcttatccacatcaacctacggagtacttcgtataaagtagcgtagtgggtagtccctctcagccgccgttgtgtatgaaccgaagaaatatatctgaaccgggcaattaattgcgagggaccaatcgtacatgtgtatatgcagttggcgagaccgagccaaggggtatttttgcataaaaacaattaaaatcggtaaaacagcaactgcaaaggcgtggaacgtctgtcgaacctttccaaggttctttttttctcaggggatcctcccactaaggaatgcgccgggccactaaaagatataattagagattttcccccgtatgttttttttttgggactttcaaagctccgccactgctttgcttcgcctgctagctccgatctagcgtgaatatacggcgaagatcagaccgatataggaccccggcactaccaatatagaccccgggactcagattgccaagaaaaggagaaaaaaaaaaggtactatttatttacttgctattattaacaccaacgtcaatggaaatatttaatatttatttttaacaatgttcacgaaataaacatcaaataatatgccaagtgagacattcgattcccctaacaaccagcattggcccgagcattctcctcattggacgaaagcttgcacaaagtgaaagagctaataataatccgcccctccccctaccctctctgttcttgcccccctctacaacttataaatacgaaactcctgtgccttctttgcatctttctatcttgtctcctctctctgctgcttttaattccccctgacaatctttattctctcactaccattgtctttgcattcactttttgcttttgcccatcatgtggtaagctctggtctaccatccatggttgaagtatccatgctcacagttcttagtggaatcttcggctacatcaactacctcgtggagaaggaccgcaggttcatcattgacacactgcttaatggtgagtcgccaagtgtgattcaatgattttagccttttgctcaccgttatttccccaggcctctccaggttggaataccgtggctacgactcggctggtttggccgtcgatggcaacaagaaaaatgaagtctgcgcattcaaggaagtcggcaaggtggccaagttgaaggaactcatcgatcagagcacatatgacatgaccaagaccttcgagtctcatgctggtatctctcacacccgttgggctactcacggtaccccttcccgccagaactgccacccccaccggtaagtcccagaaaacaccccccccggatgatggagagaagatagagaagctaattggatggtcgaacagttctgatcccacctgggagttctccgtcgtgcacaacggtatcatcaccaactataaggaattgaaggctctgctagagagcaagggtttccgcttcgagaccgagaccgataccgagtgcattgccaagctcgccaagtacctttacgaccaacaccccgacatcgaattcacagtcctcgccaaggccgtcatcaaagagcttgagggtgccttcggtttgctgctcaagtcggtccactacccccatgaggttattgcggcccgtaagggttcgcccctagtcatcggtgtcaagacctccaagaagatgaaggtggattttgtcgatgttgaatactcggaagaaggtgtcctttccgcggagcaggcctcccagaatgcggccgccaagaagtctgccacaagcctccttgccccccccgacaagtcactgttgcaccgctcccagtcgcgggcattcctgtccgatgatggcatcccccagcccgtggagttcttcttgtcttctgacccatctgccattgtggagcacaccaagaaggtgctctacctggaggatgacgatatcgctcacatccacgagggacaactcaacatccaccgtctgaccaaggatgatggcacctccaacgtccgtgccatccagaccattgagctcgaattgcaggagatcatgaagggcaagttcgatcacttcatgcagaaggagatcttcgagcagcccgagtctgtcgtcaacactatgagaggtcgtctggatgtagccaacaagaaggtcaccctcggtggtctccgccagtacatctcgaccattcgtcgctgccggcgaatcatcttcattgcctgcggaacgagctaccactcatgcatggctgtgcgtggtatcttcgaagagctcactgagattccgatcgcagtcgagctcgcctccgacttcctcgaccgacaggccccagtcttccgtgatgacacctgtgtgtttgtctctcaatctggagagaccgctgattccctgatggctcttcgctactgtctggaacgtggcgctctgaccgtcggttgtgtcaacgttgtcggatcttccatctctctcctcacccactgcggtgtgcacattaatgctggtcccgagatcggtgtggcctcgaccaaggcatacacttctcagtttgttgccatggtcatgttcgctttgtcgctgagtgaggatcgtgcctctaagcaggaccgacgtgaggagatcatggagggtcttggacagatctccgagcagttcaaggagatcttgaaactcaacgaccccatcaaggagctgtgtgccaagttcttcaagaaccagaaaagtttgctgctgttgggccgtggtgctcaattccccactgctcttgagggtgctttgaagatcaaggaaatctcatacctccactgcgaggccgtcatgtccggcgaactgaagcacggtgttttggctcttgttgacgagaaccttcccattatcatgatcctcacccgtgacagactcttcactaagtccttgaacgcctaccagcaggtcattgctcgtggtggtcgcccaattgtcatctgcaacgaagacgaccccgagttctccgatgccctgaccgagaagatcaacgtccccaagactgtggattgtcttcagggtctgctcaatgtgatcccattgcagctgatatcttactggcttgccgttggcgagggattgaatgtcgatttccctcgtaacctggctaagtcggtcactgtcgagtaaatgtttctttagggcaaggttagacgattcttatgatccggtcatctttttatttttaggtgttttcagcttcgggacaatggaatctcgttttgttttttcaatcatctttctttgaatccaatgcctattagtattttttagttaagaatcagtgtccagctttataaaccgaattgaccgtagaagcattccacaggccaattgcgctcaattgccgtgggtgatgacattccgccttcccccgccaaatgcgggaccgagggatttcgcccctcgagcctcgagctctgattcctaaacacttgtgtcaagctcaattcttccaatcttcaggaaacaacatcatctttctcggacgcccctctcaacaaaaatgactaccatcaaaggccccggcgcagcccagacccacgatggtaaaaccgaacaacagcccttggagaaacacccccagctaataccgattccaccacaggctccggactccgcgtggcgatcgtgcacgccagatggaacacagtgatcattgaccagctggtatcgggagcgaagaagaacttgctcgctgccggcgtgctgccggagaacatcacagtccagacagttcctggtagctacgagctgccgcttgcggtgcaacggtgagtgcggggatgatatctcacacatgacattgtatactgtatacgactgcatactttatagtatactgtatactatgcgctgtagtgctgtgtgctgtgtgcttgctgtatctgcccgtgatagcgttgactaacactacttgacatccagcctctacgccgcatcccagctccaggccaactcctcctccacgcagggcaccagcgccacggacctcctgtcctcgccaacagccgaagtatccggctcgaccaacttcgccagcccgaagaaacccttcgatgcgatcatcgccatcggcgtgctcatcaagggcgcaaccatgcacttcgaatacatcgccgacgccgtcagccagggactcatgcgtgtgcagcttgattcgggtgtccctgttatctttggcttgcttactgttttgacggagcagcagggattggagcgtgctgggcttgggaatggtcatatgcataaccatggtgaggactggggaagtgcggctgtggaattgggtcttaagcgcaaggagtgggctgagggtaagattttgtagaggtactttggaagagaggctgggggctacgatgggaccctctgatatatttggtgtggctttttggaacctgaataacataacttggtccgttgtgggagattgtttttggagtaagaaagggaacatctttcacagaaccataattcttggggagcataatctattacatgttcactcttccatctgttcgccttgacccttgtcctcctcttcttcgtcatccccttccaaagaccgctttgctgctttctctgcttcctcgaggagctccttgggcacttcctcgtggcggcccttggtcggtccgtcgaccgagctgatccacgtcatctcgagctcgaagtccttgtccttgctgtcctcgtgggagacatagataatgcgggcagcttccttcacgccatctagcaaagacagattgcccgaggtcaggtctagtttctcgagttcggctttggcggcctgtcgtccctttccagtagcagcaccgtagtagccctataaatacttgtcagcatattcaaacacccacacagcaaacaagtcgcaacgtacccaatacagtccactaggctcgatcatgtataggccagggcctccagccttggcaccctcgatctttccaccggagccagacttgggtccattgccgacctgtccatcaactggaagctccgcctcggtatcccagccaccaacaatagcagttacaccgaagggccgtacactggagtaaagagtgtaggcctgaacatacccacccaagcgattggccagcgcagcggtcggaatgggacctttgtatgtgcctctccaggaggaagcttcatctctagctctggaaacaaagtgacggccgtcggggacgagtccagcggatacctgtggtagaaagaagacagattagcaacggatacttgaagccttccctggtagcatgcttttgataaaaacgtatttcgtcggggagaggcgacagggagaaagggaagtaggtctcacaattccgacatggcgatcgactgttgcgattctcttgttcgcgcctggctttaggagcttgctagtgatgatcttctccactgccaacactacaccatcattgcatctgatgccgatagcggtacctccgttctcaactgccttgacggcatattcaacctagatggtatggtcagccgaagctgttccgtggctcattcatgagctgggttgtgtttggttacctggaaattccggccgtctggcgagaacaccgagttggagagatcgtagcctgtgccgattgacgtctaaataatcactctgttagcttgatcgggatacagcatagtacattgtgtggatccgaagctgactgaccatgattttggtgaggatgcgatgcggtgaggttcaaggacaatagacgtcaccgtgggtaggccgggggatcgaaagaggtaatctgtattggacagataagggaggagaatggccggtttggagggagactatggataggtagggtgaggttggaagctctggggatgataacggaggttcctaggctaagcagtgacgctgtcgcgtcacggggttgcctggcagagcttccagtcacatgaccatggggtacctaattggtactttgatttgtatgtcttctctacaagcttttggagtactacttcagtaccttgtagtattggatgtattggatgtatcatggacacagcgcgaacacactgtgggcatatatggacccattatggatcgattacaggcataaaatgcagtataacatttgagcatctcctactggccctcggactgcagcccaaccgagcaagcacttgggcatctttgcccctcgatctaaacaaaagacacaaactctctgaatcctttctcgtattcagttttagagggaaaaacttctgaatcgattctgccattttcccattttcccattcattcggatatcgtcgagctatacagaaatctacccctccatgtcctcctcgatactacatcagtgcccgcactgcgggcacgtctccgatatctcaaatgcgctcacagccttcatcgagaaccctcactgtaaacaggtagatggtgctcgctcttacatgttatgccaaggaacctgacccaggggcatatatatatctagtgcggcatgtctgcttccgaaggcgagtcgaaagtgcaagacgaactttcagctctgttcgatagacaaatgagtatgacacagctgcagcccgcccctagagaaactgtcgtaccacctcaagcgccacaaattgcatacagcattacccaacactaccaccactcggcccacagagtcgcccagcacacaaaccagccccagcacacaaaccagccttcaagcgttgatgttctgagacatcacggtcttgatccaaatgcccttaccccggaccagcttatgctcttcgagaacgccgaagcggaacagagagaacgattgattcaaacatggcggctctactcgcagtttgggaatgaagccgccactgccggggactttgctatgcatgattctgctatggaccacagtgaagatgggaatgcctatgctgatgctgaaccctacatggtgtcgggctacgggaacgttgccaatcaagcctctcatatcccgaaagagcctaccactggtgaatcatatgctggctcaaaggacccggtgtatcaaggtcagcaatggtgggagttgacaaaagccggtccgatggagtcgaactatggcgcatttgaagagatgagacgatattaccccagctgtggtgtataccaccattagttctgttaaaatagatctattggaacgaatttcttttgtaagtatcatattattgttatccttgcctctacatgccctaactagcataaacacttaccaattagctatccaattactccctcggtcgaagggatatataccaaatttaggtcacccgagttaaccggtactttttgtcttttggaattctgatttggaatgttatttgagaggagatggaattatttggttctagatacatatttatttgcgtagtgatccatcaaccctcacaattcaagtgctgatttaatcagaaaccaatgccacctgggcatgaccaacggtgaatataaaggagtgttcgccattggcatttcataaaccaatccatcttaactatgccaattggcttccaaaagctctcataccgaaaagtaatcgacggtgttgtgcatatcgataattgaaaagagagctatcgagcaatctctatcgatgttgcagcaccacggaattcattgtataggagacactgggaaaagtcagtaattgaatccatgcacaggacagatggaactgtatcatacctttactcctcttcctcttcctcgagggcagccatggcataagcgagagcgtcggcggtacgcttgacctcatcgacggcatcggcggcacgcttggccttgtagcagccctggccaatgtggccacaccacttctgaagaacaaggggcagattcttggccatggcctcggcgagagcatcggcagagcgcttgacatcgacggaggcatcggtggtccgcttgcagccctggccgatgtggccacaccacttggggagagttgtttgaggagtagcggcagcctggacggtgccagcggcgagaaccgcgatgacgacggaggtgaacttcatcttgatggttgaaggagaaacgggggtttgaaattgaaagttggtttgaggagcgaaagacagatactgagatagctcgatgatggagatgtctggagaaaagaaagcagaacgaggaacagccaggtttatatattcttaaagatcaggatcatcgttggctcaatagtagtctcgttattgagaagagcatgttgggccggagttcggagattcctttactctgaatagagacacggccctgaatagagctctttgtcaaggaacattaacccaaatagaggcactgctcgagatcggcactgtttgatccaccgtgaatagggttcttattgacaacccttagcttgcctcctcaataaggaactctgtctcgtatagagggtccggggcaagccataatttggaatgctttgacaaacagatgggctgataagcccagtggattgaactagagtatattagttaagatggtagatatgttcttttgttcgagttgaccacttgacctgaggtatgtgatattcgaggaccagaagaggatctgaataagaattgaccaaagaaagttagttccggggaataagtgaataagaatgccaagctcatatgagatttcattgtttcattgtagctgtagtatgtctagtgtcgtgtaggtagtgtaggtagtgtaggagtggacatactgcccagcccaagtgatccattcagataagatcgggccggcgctaaccacaagtcgctcgatgccgagcccatccggagccttttctcccgttttcacgcttcccttttccaaccccctctcacttcgattcatacctcacccaatctctttgtttaaatatccaatcactcgaaaatgttctccagaaccgcacagcctgcacgggtaagttcctccctggttttgctttttctcggtttccgcgtttccgcgtttccgtgatctcagtcctttgcaagggagttagtggcagcttcgctaacctgtctctgctctctatagactctgctcagcagtgcttccgcagcttcatctgtcggccgctctgttcccgccagatgtacgcccattaaaattccctgacgtgcatcaaaatccatccccgctaacccatttacccagccttcgctagtgttcagtcggatatcttcaagcccaccaagtacggtggcaagtacaccgtgaccctcatccctggtatgcttcacatgttttgcgccttctccgctgtcatggcgcacgctcttgaactaacactcgacaaggtgacggtatcggtgctgaggttgccgaatcagtcaaaaccatcttcaaggctgacaacgttcccattgagtgggagcaggtcgacgttagcggtgtcgatgccggtaacaagcactccgaggagctcttccgcgagtccctggcttccctcaagcgcaacaagctcggcctaaagggtattctccacactcccattgagcgctcgggccaccagtccttcaacgttgccctgcgtcaggagttggacatctacgcctccatctctctgatcaagaacatccccggttacgagacccgccacaagaacgtcgacctctgcatcatccgtgagaacaccgagggtgagtactccggcctcgagcaccagtccgtcaacggagttgtcgagtccttgaagatcatcactcgcgccaagtctgagcgtatcgccaagttcgccttcagcttcgcccttgccaacaaccgcaagaaggttacctgcatccacaaggccaacatcatgaagttggccgatggtctcttccgcagcacattccacaaggtcgccgaggactaccccaccctggaggtgaacgacatgattgtggacaacgcttccatgcaggctgtgtcccgtccccagcagttcgacgttttggtcatgcccaacctttacggtggcattctgtccaacgttggcgctgccctcgttggtggacccggtgttgtccccggttgcagcatgggtcgtgacgttgctgtcttcgagcccggctgccgtcacgtcggccttgacatcaagggcaaggaccaggccaaccccagtgccatgatcctgtccggctccatgctcctgcgccacctcggtctcgatgaccacgccaaccgcatttccaaggctgtctacgatgttatcggtgaagggtgagtgaacgccaataccgttatgaaaaatgacaatgctgacttccttcttttagcaacgttatgacccgcgacatgggtggtcgtgctaccactcacgagttcacccgggctgttttggacaagatggaggcggctctgtaaattttggaacccccctcactccaatatacctaccgctacgattgaggatgttgcttgctgattcttgcattgtgctctgcacaccgtgaattggtcggtgtcgtcttcacttgatgtattatctttcctttcaatttagctcgacacgttccctcgcaagttatagcaatagactatttttcttttgttcataacgaggacattcattgcattattaattgggtataaacatcgtgaatcttcttcaataggccagtctcatatcgtgcccagaaggtagagagctcatcctccaagcctccaacccattgcgaggcctctagcaggcacctcacgatcgactaatttaacccgagtcgaacttgtaggtaccctatgggcttcccggcaagacaatccgaataacgcccaaaggaatgcgcatacacagacagaatgggtgaaagctatatacttcgggagaatgacttgaagactcctttcatccgggctttttctccttttctcctttttttcgtttctctttttgattggatccgacaaagacgaacatcggtgcccgtaaacaaagcagtccgatcagaaagcgattcgtcgtttgcggccggtgtatttcgagctagccttgacgaccttgcccttcttcgccatctgctcctttttgttcataatccaagccttgtctcccttcctcggaggtccacgggcattattgatctccgtagccttccgccgagcatccaagatattgacatcatccatgccattcacaacacccgtaatatcaccgggcagaccgccgccaccaacagtcagaaccagatacaacttgctgctcttagttccggggtcatcttcaaggatacccgcaccaaagccagctttgattgcagccccactgatcatactccgctggacatcattcttcgggtagaactgacacaccgcacgtccaccccgacgaagactagcgtacagaccttcgaagaagcgtcgcagccgaccttcagcagtgacatcgctggtttccgcattgcacagccactggatcgcactgatgctgattgcggcgtcgaatgtgcccggccggaagggaactccctgaccgatatccgcgaggaatagatcgccttctacttcgcgttgtaaagccacgtccaacatgctgggtgagatatccatgccgacccatgtgtgcgggccgccgtcttcgggttcgacttcggagagcatttcgccggagagtccggagccgcagccgagatcgaggatgaaggatggcgattttaggtcgaggagttccagtgcgcgactggtcatgctggcctggatgttgcgaattcgcgacgactttgtatactttcgagattcattgtcattgtagaacaggtccggagggctgtagttttcgagatgcgatgttagttttttttccttcttcatgatatatgcagcagagtcatgcggtcatacagggtatcctcagggcgcgacatggtgtgtggtattgaatgtgcaagttgcgttgcgagttgaagttcagaaattcattaaattatttttggtggcgctgcctgaggcatccgtaccccaaaaccgtccacgtttctccgattgcatctcgaatctctctctctggggctgattgcctcccgccttacttttcaacactatcagcgctcgacagctttgtatacactgcgcgtcatgtggattttaccgctagtcggatatttcggtgtggttgtcgggtttgcgtttctcaccttggctataggtatgggacatggagtcctgacatgaatgggcaaaagctgacttggaaactccagcttcgggactctactatctatccgagctcgtggaagaacacacggttatcgcccgccgtctgttaacccgtttgatctacggcatcgtcgcgatacaagttctgcttatgataattgaccgtttccccgtgtcactatctctgctcagcattggttcccatatggtctacgccagcaatctgcgccgattccccatcgtgaagctatccgatcctcttttcctcctatcctgtcttctagtcggtctcaaccactggctatggttccgccacttctcgaagcctttgcctccgtcgaacaactggcgtcaaccatatggagtcaattacgatgagatgccctctttctctgaagtggcctcatactttgggctgtgcatttggcttgttccattcgccctgtttgttagtttgagcgcgggggaaaacgtgttgccaagcatgggctccgaatacgtcaccggggaacatgccaaacccgctggactcggtccctctggtggcaagtccaagaacaagggaatggccaaggccttggtggatggtgtccgcgattggacaagggagaccggtgaagtcatgggtctctggagaggagaaagtacaagacgattctgagtgagcgaggccacgggaattgataatatatatatatgtaatgaaatttgtattccgccatcgcgtcgtgtaaattgtaataacaaattggcaaagtgcgccagcctccatatcgcgtaactctggaccaccaaatttccagataaataaaagcagataatgatatatggacatcgagccctaatggtagcgctgaaatatgggggaaagaaataaaaggcgaataataaggggaaatatgaagaaaaagatgaagtagataaagaagcagaacaaaaagaaggggtataacggtgaaagttgctggccatggcatgggaactcccagctccaagatggacagccgcatcttgattaccattatcattaaaacattccctcgcgactttgatgtctgagattgccaagtggattaagtcatcattgtgcagtcgtgcaagtcgtaatttttccgaataagagaggcatgaccactggacattccagaatcggaagggcgtggggaaaaaaaaagaaagaaaaggccagtgagaagcgaatgataattcacttgccctggtagaaagaaggatcttcatagacagtacagattagtaaagtccgtgggaatattctcgtgcttgggtcttaccctccataaagagcattgaactctcccgtcgcttggtctttgccgagcgagtgtcttccgagctagcccccaacatgccattcaaggaagaatacgaagcgccggcactctgatgttgatggtggtggtactgctcatgtctggaagacgtcggttggtcatagctaggttgcattggagtgaaaccagtgtcgtggtgtgtcctgggaccatcggaaggaccgttgccatcaccaatgggtcggaacgaagtctgctggtacgaaggtgtagggaggtctgagaacatttgatgacgtggggaacgaatatcatcgggcgacagagtgttttcaactgtcagttccatagccggcctcgcaaagctcgaatcagtatcgccaaagatactgtcgtagtccgtgaggaacatcgagaagaccggcgccggaatattgagagttggggcaaagacaatgcccacgttcctgaccgtcatcttgttcacatcggaattgttcacaatctcgatcaagaattgcgatagagctcgtagcaatgcgagattgggtctaggcagcctatgcactagagagttgaaggcagcgaccttcttttggcggtcgtcaagttcttttcaatcaggttagtaaaaaaaaaaaagagaacaccaaatgtgtacataccgagaacgcgaaggaagtccaaatgaagctcccgggttaagactgtcgtcggaagctctcgaagatattgcttgaagagagaagccacggcatgaatgtcgtaatactgatctccagacacgaaatcaacatcaccttcagtgttgaaacgttcttttaacgctttaatcaccacattggaaccactcagacggaagataccttcctccaaggcagcttccttggcatggagatattcaatgcagcgataaaccactgccggcagctccgcatcaatgcctggcagtccacaatcttgcacggcctctgccaagggtataccaaatacaggtctaataggacccgtcctctcagcattgtggcctgatgtatcgccgctggcgtggttggcaaggtcgaaagaagacctggaccggaaaccccagatactacgtttcttctctttcgtcgatgtctttgctttgttgccccaagcctccaggtcttgaatgaccgtgccgtttgtgggcctagatatcaatctgggagactgcattgtttggtcgggagacatcgtcgtgtccttgaattctgtcgacaacgtcgtcgggattcgtggagaccggggagcttgctcaacactggaaccaatagtcggaggatcagctggcactgcatcctcaaagctgaaaccctgcacagagcctcctagatcctggtcgggactatcaactcgaccagatttcttgcttccgttgaatattttagacttggtctcggatccggaaagtagttgcttttgctgcacgtgggattcatcttgagactgaggctgactcttggaagacacgctgccacgtgcctcattttcggaagaagcattctcaacatattccatgagagcatcaacccacgtatcacgctcctcgtcgctctcggcgcagagaacatgccgaacaagtgccgaagaatccttcttctttggttccaacaccagaaaggcatggcgatactggttatcagaatcatcctcggccccaggagatggaacattctcgttggatttcggcgattgcttgccgatctgggcatgatgaagtttaatggtacccatgtgcggaccaccgggagattcgtagtatctcagatcaggtccatcgagaacgaaatatctcgctttccagccaccgaagttcttgcctcgtttggtcaagtaaccttccttttggggctttccgtctggtccacgtggcatgtcgggccttgtctgggcgagacctttcagcaaacttgtctcgtcgtctcggggttctatggcatcacttgtcaaaaattggcagatagctagcgcggcattctcgtccagtggcgtgtccaacagtctgtcaaagtacgcattcagtgcggcacgtctcaggtcaaccttagcaggggagtgtccgctgaaaatgctcctatccggtaattttccggggaacggagaagattgtcggactttttgatccagctgtggtaaagcaccgatgaccttttcaactcgccatagctctgacatttctgaccgcaggatcacactgagagtaaaaacaggctcctcgtccaggggcctcgacgccatgtaactattccgggaaggtcgaagccgcgacgaagataccctgacttgaaccagaggaagggcattcggaggtaaaagcaggccctgatattcgtcagacatcaaacctcggtagatttgattgtcggggaaatttgcagatctcgggctgtcaatcatgattgtgggatcaattaatggaatagggccacgtccggaagggatgggagcaaagcccatgggatgattagccattcttggcgagagcggcaatccctgggcctgatacccggctgccatggaagtggaaaagtctcgtggcatgcgcggcatgggagaattaacgggtcgatcttctggtctcgggctcaagggcagtccagggctcaagggcatggcagcgatagagcgcccattgacggacgaagaaggagggggccgagagcccagaagtgaccccagtgagttagaatcacccacatttggcggtgatctcgtagaatgctccctggggactgttctcgggctacatgttgctgtatcccgggagctctgagaggatgctgtctgaggcggttccacagagccggtagacccagacatatccttctccagcgcagcttcgcggtcctgatcatcctgctctctcgtctttctccgcccacgacccgcactcggaaggccatttacatcctgggaatcgccgtaatcggaaccggaatcggaatcggaagctgaagatgccctgtcattgtctgcttgtcgtagattcagaggcgcaggcggtggtttgcgatttgggtacggaatcctgttatttccgtctcctacctgagacgggatatcggcggcatagactgggcttctggtgttttcgaagccctcccgccgagaggattcaaaagctgggacaatcgatggttggtcaggtttgcgagacacattctctttgtcactgctcggtgcagtcacagaggccgagggctcggcaacgggcaatggcggagcgtcttgtatatctttgagcttcttccgatatttctccttctcttgaaaagcacgctctagatccttgttaaggccgaggattaaagtcctttgtttgtccactaatttccaaagttgcgcgttctgagaggccgcttggtgtttctctttcaagaggtgcacgatcacagcctcggcagatccagcggcattgatgagattgtttatgtcggctgaactcagagcattgacatcaaaggtcgatctctgagagctggaggacagggacgagatagcagaatcgatcgacgaggtgcgaggcatgatgcgattgggtgtgcgatcacccggcatcgagtgtacagagctgacggaggaagagccagatcgatcgggctctggcgcacgggttgatttcggcgtattggtttcgccaggtcgaccgctggcattccccgaatccatttctggcgattgcgacgggctttgaccagtactggagggtggcgcagggtatggtgcattggctacgcgagtgattggcgaccaattctgggcggaagaagggttggatttcggagataggggactatcggatgatgtagatccgccgacacggtgcgactggggtagggaacttgtatgcaacggggaaggtgtgatatttcgggaaccaggagcaggaccggggcgttgatcggatcgagctaaataatctcgcggaatgaggccgttattgactgggaaaccggaccgattattagatgaagttggcgggctttcattattctcccgcgggatttgcgacatggctgtcagagtcgagactcatcagaggggtcacgttcggggggcgacacgaggcgaaggcccaaagggcgaaagcgcggaaccccggaagctgaagcttaagcgccagggagcaaaacagggggtattgttaaccgatcaactgattggaaagaaagcaacgatatgaacactccctttgtggcacagagaatgagagttgaaagggtgagagagcttaagtgcagtgtgggggggggagaaaagggggtatcaagccaataagaataataacaaaaaattagataaatactaaggagacgatcatgagagaatcgcagtccttctgaagaggaaaagagaagaagaagcgaggaagatgatctgagatgtctttggtatgcagaatccctttctgtcggggttacctaaggtagtaagaataactatcacgagtaactatataactactccgaggctgtttttctttccagtcactttgaatcattcttttcttttatatattacagtgtatcgtttataatggccttttacaaacaccatagaatgagaaaataatagttatatgaactgttgtagtacgaagccgtcctagcactcggagcaactgcggtggaaccgagtgacatgaaagtgaccgaaagctattggaagttggtgatggaaatattttgaatgtccagggcaatgcctggacatcgtctcacagtggactagtttgagttcggtttcagacttggcttgagatggtttctatctagaaaaatgacctagactcctgtaaatgcgaccgcaatgactatatagtacagaccaaatcaaaaagaaagagaaaaacgccggtcgaaggtggtacagaatgatacaattaggcgatgttgccagccatgcccatgaaaatagcctgggcggccagctgaagggaccagaacccgactttcttgaaacgccttttccgggcttgatcatccacgacatctcgcgcaaatgcgtcgtaggtctgcagaatttatcagtaatgatcgggggaggaaaagagaaagggtactcactgcagctgacaggtcatccatcaggccactgtcaaagacggtccagctaccatcaaaatctccaacgcgcttgactaagcggcaattgatgggaataaaagtgcgtttggagttgatataggcaacaataggacgaatcagtgcattgttgatgtaagacaggtcacgggtgaagatgggtacgacagcccgaacgttgttgaggtgcacgcgcatatccatggcgatgaaacgtcgatcctcagtctcggaatttgtactggaagacgaagatagaggttccggataacgattggtggtgactgtggtttccagccgatcatagaaatcaaccatcaccttggccaagctctcatcattttctgcaggtaacatgatatcggccacaatatctactgtcccttcgtgaatccaagagaaaggaccctgaacaccgcgattgaggtggtcgacattgaggccatcaactcgaatccgattatgtttcttccacgggcttggcttgccgtcttcttcttcttcgctatcctgccggagacccgtgaacccatgggtttgacgagcgtggattgtgaacaaggaattgtcataggacccagacatcatgttggcagagaggaaatcgtagaagagccattgcttccgcaattgagggaggtcgcacgagaagatgctcacggagaagggccggaagttgtccggttggtaaatggtgacaagcagatcatgcatcttgaaagagtcaatctcaaagtcaccaggaaggtgctcatgtcggtaggatttaggatccaagtcctcctccggccagtaaacgtggcggcggtcaacaacacctcgtatacctttcacctcaacatcatgaagtgggccctttccattgagccatttggtaaatgatagggtcacgttgaccgtctcaatcgacagatcaaattgtgtgtagttggtatcttcctcttcatcagatactacctggaaatcttctaatccagtatcacctcgagctgcggctgcagctgccgcagacttcggagatcccttactgacatggcctgtgccttggcctggtcgcttcgacacaaagacattcttgaaggtgatgacgccatttttccacttgggcacgattgcagattcaaagacaactttgactccagaagacttggtaagatagttacccacccaccctgccaatgtttctattcaagcacattagtatccagaccttattgcggcataaagtggatggatgtaccttgagcaaagaccgtgttgatcgcaaggatcaggagcgagaagaaagtggtagtccccacgacaacccagacgatgtgacccagcaaaacccacgagaataaggcagttatctcatccatattgtaaggacgaacacttcttatagaaaaccatttgaatcgtactttgagacgtgaccagaacccagttgctgcagctaaaagctcctccttggttggccgatgtagctgaggcatatgtggtaagcgatccattaagtggcgattggtcgttgttggttgctgagtatctttgggtgggctgacttgtgaatgtgcggtggatgtatctttgccggattggccgggtttttggggatggtcattttcgttgcgttcatgagtgtcttgtgaagctgctttcccgcgtagacggtcattcgaggtgtgtaaagttcgcttccaaacatgctgggcggcgattttcgaagaggagatgatgcatgctgcggtattgtccgcagcagttgaggtaggtgaaacgccgaggaccaagaagccaccggaagcgaatcttttgaaccgcgtgggtttcgttgggagcgtcgagatgcgtcgtgtgtggcttgaaagggacgaatcgaggaatgatcttgaggcgtaagcatcggaggccgatacgcgatttattcgtatgcgaccaagaaatggatttgctgtatcccagatatgggcatagagccggcgtcccagattggcagacatgtttgtctttacatactggacatgaatgagaaacttgacacgaaaatatgacaggcacactgtatcatgaacagcagttgacttgttgacaagaagcttgaaagcttgcaagagttgcgaggagcccgaatgaaatcatcggagtttgtcttgtttgcagcaaaaaattcccttccgcccacacttcatttttccgtgaggggggaactgattaaattttacgataacagattttatgagggaaaaaacttgattccttaagcaacacaatgtcggcacctacagctattcgccagccagagcaggccctagagtttcagccagagactgtctctcatggtgagtactcgatccgatctgcaaatattattttcaaggctgacaatcaatagatcaggatgatgaagttctgatcgatgtacaagccatggacgagggcgctccgattaaccccgtcgccgagtccgtggaggacaccgaaatgcgcatcgatgaggaaggtcgccctgtcttcaccccggctaaggacgtcgccgccgcatatcggatcgagacacgaaaggtgcctgtcccaccgcaccgtatgaccccactcaaagcgagctgggccaagatctgccctcctatcgtcgagcacctcaagttgcaagtgcgaatgaacatcaagacccgatcagtggaattgagaacctccaagtttaccaccgatgtgggagctctgcaaaaaggtgctgatttcgtcaaggccttcactcttggcttcgatctcgacgatgcgattgcccttctccgacttgatgatctgtacatccagactttcgagatcaaggatgtgaagactttgaacggagaacatctcggtcgtgccatcggacgtattgcaggcaaggacggaaagaccaagtttgcaatcgaaaatgccagccggacacgagtggtacttgcagaccagaagattcacattctcggtggattcaagaacattcacattgcccgagaggcaattgtcagcttgattctgggtagccctccggtaagacttgatcatataaatcttcaaaggaattcttctaacacaaaatagggcaaggtttatggcaaccttcggaccgtcgcctcgcgaatgaaggaacgcttctgattccacgactcatttatctcatctggcatggtgtgggcgttcaaggtgcatcaggtttaagctgtcttctttttctgatcttagaggcttgacgacgtttaacgtaaatatatcaatcaattcatggaaatttcattcatctcaattatgtttatgatcattgatcaaaaatgagccccacgcccaataagaaggccacgatctaccatgtcctacactctaatcctgcttcagggcgtggaacacctcctcgattccttcccgggtaacaatcacaatttgcaaaccatcgccaacctcgatatgtctctccacagcacttgtaaaggcatcctgtacaagcttcttggccgtgtccttatccagaggctcggcctttttggccacaagggcatgtccttctccgcttcctgggatgtattggttcttggagttgacttggttgtccaggaaaggcatgatcaagctggatgccgcaccggcagcccgacactgttcccgctcgtaggaacccaccgggtcgtagctgtacaaagctcccacgccttcctcatccagaccagccagaatagcatgtacgtagtacgggaagaaccgcttctcgtagaggatagttgacaatcgctgtgcacatgctcccactgacatggttttcccatgttggtacttgtacatcttcaccacggtgtccagcttttccttgagagcgtttccatctgcggcgaaaccaacaacagaaagaatgatactagctccctcgccggtctcatcatcaccgccaatcttgaagactttgggtaccatgcgagagttgatattgtagcctgatgtggaacgagtgtcgccagcgaggatagcgtaatcagcacctgtgatgccgagggtggagccgccattatcggtgtaactagtgtaactgttagccagttttcctgcacagtgatcgagttgttccttacgggtagaacgagtgttgtttgacattagcggatgttggctcagagaaggagtatccgatagtcccagactggttacccatgagcgacgtcattttcggggatatggagcttgatcgggaggaaatatcagaacggcagctttataaaaaagactaaagggttggatgtagaggattctggagattgggcgttctggaggatggagagcaaagaagctgggtgtctgacgcgatgcggtagctgccttctattgattaggtaaggaatatccaagctccccgagagccctggagggctgtctctcgatacttacggcgcctcatttatttctgcatgttaagtttgacatactctcgttcgaaagataaacttgtccatatctctggatcttaccacagtgttatcctgatctccttcggtctcaacgcttatacctaggacgaattgcgacgtgatgcttggtcttggtgactatgaaagcaacagtgaggatgaggtagaacagaatggtccttcacccaattctcaggtattttcagctccgaaacaacggcattggagagttgctgatttgaagcaacagcgtaacaaggatattccacctacaaccttacaagctagccaggacgaaggtaacatgcctcttaattctccgggactagctccgacgattggcgctgacgatttattcagatcataaaccgtccagccaacaatcaaaagaggcacgcttttacatagccaccgattctgtcccagaaggaccggtccttggccccgcttctatcgacatggcgcccctctcggagaacaagcattcgacaagtggacgctcatctcccttttcggcttcacgtggactcgttcaagaccttactctccccccggttcccaatctagacattccaccatcacctcctgggtctcctaacccagccgcgaacgcgaaattcgagcatttcctcgcgctcaaaaagcaaggcgtacacttcaactcaaaattggccagctcgtcgtcgcttaagaatccaagcttgctgaagaaaatgatggaacatgccgggatcgatgagcaatcgcaatatgacacatcgctgccaaccgacttgtggaatccctccaatctacccaaatggggtttcaaggaagaactcttgagaacgcaacaaaatttccgtaaacaatcggaggagaaaaaggcatcgggccagcgaagctcggttgattttgtcactggatctgcttgaagattcattcagcggcaaccggaccaagaataccaaccctacagtatgccagatctaccatggtctcgggtgcatcagatctttccggaaatttgagcactagagattatgacctcaaacggcggctccagcacataacttgattgcttcgaatattcggtagcgcagtatttgcctgccgggcatgggaacttccgttttggtatcctacgattcaagaaggagggctcttctataccttcaagattatgtgcccatcttggagaaacatactggtggtcgatccactgactccagaaagaggatcaacgataccctctcaattgacatagcgcacacttagactcgtgtacattatcatacttgtggatcatacattgcaacaatgatgcttgtttcaacatcctccgccgccgccaccaccaccactagatgccttctgtttgcgcttcgccttctcatacaaacttaaacaagaaaccaacaccattcgatcaaagtcttctccgtattccactctgatttgcagtttcccacctctgcccagtttcgcacctgaaaatacggccaggacatgctcggtgtgctcatccacgagcttatagttccgagcggtccatttagacggtgctgaatcctcaacgccaacggtgcgtgttcgcttccataggaatgaccgtctctcgctctgagtttggtcagatccacactggactgtcatttcgaagcggtattttggtttgtggatgagttccttggtcatatcctcccactggacggcgttcacatcgtcggggtttccaatgcctattttgtaaccaccagacgacttccggaatttggagacggccacaattggggcctggctgctggtaccagcatggagagtaaggtcaggcttgttgagagtgaacacagatacttcgccgtagaacagaggctgatcatccgccgagttgatgtcgtagtgcctgtggaagagcctgttggtgatattatacacgcgtgaagggccattgtcaatggcaggggcaggggccgttgatccagcacgacttgaatcgggagaggacattagatttagaaataaaattatggatatcaattatttaaatattgtcaaatggagggaggtcacatcttttatacgagctttatacgttttaccagagaaggcgggattgacccttcggaagcgaatacgagcaccaaatcgggatggacagaagcacatgtatagacattggaagtgagtttattatagccaattatttgctttcatttttcttgaagatttgtattaaaggatataactactaaactagtataacagctgtagttatagtctacatcctcctggtgaacgcggagcttagtcagccgagctctccgtcagctcgactgcctaaggtaactagctccccatctacggagtatcgtcatcattctaccgtgctatccatctgttgtcttccctccttgtctgcaaaatacctccctttcgagcaccgttgaaactgtcatttatctccattcatcatgaaccactcacctgaagcttggggtcgcgtaggtggcacaactttcccattccttgctctgttgctaactatccgtccagcccaggaacgatgtctacggtgcctacgatcactcatatttgcagaccacaggtcccaaggcccatacctcatcccctgcagtgacgggaacgtcagtggtgggtgtcaagtttaatggcggagttgttatagctaccgacaacctaggtatgccgttccattgtcacgttccgtttccttcgcattcccatctgacgtgatatgatttgtgaaaatatagcttcctacggatccctggctcgtttctccgatgtgaagcgtctgcgtactttcggcgataaggcaatggttggctttggcggtgacgtttccgacatgcaatacattgaccgtctcctcgactccatggatatcaaggagaactactcgcctcacggcaacatgctcaacgccaagaacctgcacacgtaccttgcgaaggttttctacaaacgacgctctgagttcaacccgctgtggaaccatgtgcttgtcgcaggcttcgatgcggagggagagcccttccttagctcggcagatttgctcggaacgacattctctgctcctcatctcgctacaggatttggtgctcatcttgcggttccgatactgcgccgcaagttccccgagggtacccccctcgaacaagtcagcaaggaagacgccgttgatgccttgaaggagtgcttgaaggttctgttctaccgcgatgcacgaagtaccgacaagtactcgatagccgtaatcacgaaggatgggattgatttgaaggaggacgagcagattcagggtcagagctgggcctttgccgagagaatcaggggctacggcgcccagactgcttagatcctaatttacgtttttcttttacatgtaatgcacacgggactacggatgcagagataattttgggtctaaataaccacaatgatcaattgcaatgactgagatgtgcaggtagttatatacaacttgaaccagtaccaactatatcattggtctactgcaagttcaagagagataaatttagagcttggccttaggcttgtcaaagaccacgcggttgacacaggatcctacgccctccagcgaaacctcgacattatcgccgtccttcagccacaaagcaggcttgcgacccatgcccacgccttggggtctgtaaagcagtcagtctatcaaattcaaatcatttgcttgctcatcagggtaactcacgttccagtgaagatgagatctccgggcaagagtgtagttccctgagacaggaaggctatcgtcttagcgacgccgaagatcatatccttagtggaggaagactggacggtctgtccattcaacttggtcgagatagccaagttattcggatcggcaatcagactggaagaaacgataccaggaccaaacggagcccagccatcgaagcccttaccgagtccccactgaccaccaccccgcttgatctgccaatcgcggtgggagacatcgttaccgacagcatatcccaagacgtagtccagggccttgctctcggagacattattagcctctttgccgataaccacgaccagttcacactcgtaatccaggccctcgccctcctgggccagttggggcacggggatgtcgtctacgggcccggaaaccgaagttacgggcttgtagaacagcactgggtacttggggataggcatgttcgcctccttggcgtgctgctcatagttgagacccaggcatcggactgtgccgatatccttacgggccaggggtgcgaggggcatgcgcacctctgccacctggtcggtgatccggtactggccaaagatgtcgccttcaatgactctggccttggtggctttggcgatatcgctcactccggatgggaggatagcatcgccgtagtagatttggccgtccttggccaggaagcggatgaggtgctattaggaaatcagcatttgatgcagtaattgatttaatgtatatttttattctaagatactcacagtaaaggtagacattggggagtatggaatatatggggaagttggaagttcgaggggagacggtgacgaagtgatagtaatccgccattcggccgggaaaggcctctcttgtcagcgggaaacatgtccagctccacccaatgatttccacgccttttccctcttcatataataatcgagattcgcaatggctcggttctccggtctccagagggacgtcctgtctctataccgcaaatgcctacgggagatccggaataagcctgaggtgggtttatcatcatctcgtccacgtcacttcagctgataacctattctattgtaggactccaggatcaatttcaggaactatgcccggtaaggctctgtcaattgcctatctgcctatctgcctatctccctgtcatttcctttcctttttctctccccaaacgggcattcccctagatatgtgcaatccggctgatacgggaatacagggctgagttccaaaaatatatcgcggtgaataagaaggactttaataccgtggaatatctcttgcgcaaaggtcatcgacagctcgagttatatgctaccccgggaatccgcaatatccgatgagcggatggggccaaccccagaatcttggttcctcggggtgcctacacgctagctttgtatgtttcgtctttcagcctcatatatttaccagtttactcattggaatagacttggagatctccagcatcgttggttccaggccgaattcctgcgaacatgttgaacattaacatgttgcgcgaaaggcaatatgtctgatatggtcgaggccttgctttggaagcattttgtataatagtatgtcatagtatatcatagaatgatcagtcattaaagctttgtcatgttctacctacataattagtttggttaactatgttgtatgtacgacatatattcgatgactactccgtaccggtactatcagcccttggaagtttcgagtaattaccaatcacacattattcatgctgtctaaaatattcatttatcagattattagagtagtagtattcagcatataatgtaacggaatacatagaatcaagtggttgtttctcgaagttggtggaagttgctggcggccggtcgaatgtgccatccgtttctggacgattccggaagtatagcaaccaccatcaactataacgaagcagaacatataaaatagcagatattccaggacaattagaacagaacacaatattcaagacaatctctcagatcatctatcatcattcttccaatcttcaatccaagaatcccaaactcatctacaatggccttcttcactactcaatccggccttgggcccctcttcgtactcaatgagcacgagcttgccaaccaactcaagtctccccaatgttgcaaatccaaccagtgcaagtccaaccagtgcaccaagtcaagccaatgcaccaagcccaaccagtgcaccaagattcaacagtgcaccaaaatccaaacacccacctcctttatgcccgcctttgacgtgcgcgagttgacgcacgcctaccgcctagacggcgaactgccaggcgtggaccagagcaacatcgaaatcgaattcaccgatccccacacactcgtgatcaagggccacaccgaccgcgagtacatcagtgatgacaccaacaacggctcagcctcagccagctccagccgcagctcgtcagccgcaggctggcaccaagccaccgtcgaagacgaggacgcagcgtcgactgctagctccaccgacaccgctgcttccagcaatgcggtttcccacgctgccaaggacgaccagccgcacttctgggcgaaggagaggtcgatcggtgacttccagcgcactttcagcttcaccgcgcgcgtcgatcaggatgctgttcgcgctagtttgaagaacggggtcttgtcggttattgtgccgaaagaggctgcccctacgccgaagaagattcgcattctctgatttggaatcgaatcgagtggttttgctttggctttgaaagctatgcgcttgtataattgattgcattgggatctccgggtggcgtttcttttcccttccttgcatttttacttattttttacttctatgagtttactgatatgatctgattggaatcttgttacgataataaatctacatcgatgtttattatattgctatcccgtctgtagacatgtaatatgcacctgatggcacttgttaggctgtaagaacttacctcgctacttcgaccctgcgtctgttcttttaaatcaaagtcccttgcttgactagataaccttacttcgtatgcaggaatgaccaggaaaggcctgagccaccgaactagccacacggtgaaagactgaggtggtatccccacgcatgcattagactaaatggccaagaaaaccctaaaattacgaaacaacacatggcatacggcagacagaattcatggatttgtgtacgcaagaggagacactaattccatccaattccaaaagggtatacctaacaagactctatatccagatgtcccaaactcccgccaaagtaaaaaaaacacatcaactccaaaatgaacttttgacgccatgggcaaaagagacaaaatcaaaaataacgtccaagacaggaaacttaataaaatcattaccaaaattgtcgataaacagaagatggataaacagaagatggggaggtcatcatatgcacaaatctgtctggcgggcattcgtcaacctccggcggtagtcattgctccggcttcgaggccggcctcgcatcggctcggaaggagacaattcagcgtcaaggtctaggtcgtcctgcaagtagcctggggacgtgatggtgggcagcgggggagcttcaacgcttgatttcttgctccagatgcttcccagttggctgttggaccgagagagttgtgtagcgtactcttcattaatttgatattcagaggccgacctgcgaagtcgctccttcgtttcagtagtgtgctgttggtgactgagtggtgattctccggttacggtagaccccgtactagacgcaagatcaaacgattccatagacaatcgatctccatagaaaggccccttggtgaagccttgacactgtggaacataaaccagggaggtggatttgacttcgaggaacgagtcgcgcgaagaatattccgtgtatcggggcgcacacaacgttgaccgacgcgatcgcgatggagcgaggtgagtcgggtcgcttgaatcgtaccagcgagcagtggctggatgcagcgttgagtagttctctgactttgtcaccaaggtcagggaaggctgcaatttatcgctcgatcgattcggcctcgggatacagacgttctttgagctgtctgcaccacatgagctagatgtttgtgagtcagcagaactgtgagttcggctccgctgtacggagtggactgaagtggcagagctgtagccactgtcggacttgttgagggattgagaagtgctccgggaaagaccagcgtccagagcacccttttccaagtgaattcttgtatcgtcgaagaggagaattccttcatcttcggaatccccaggaaacagtgattttgtccgagggtggactgtgatagtaggagacttttcgaaagagaatggactgcctggaacatcgtccactttcttcaagtcgggcagggacgtaatctccagggtggacttcctggttggccctatgacctctatgttctcaagcccaagtccagagcctggagcgccgggcccatccaaaggaattcggtcgctcggacatggggaggccgaaccatttacaactcgcaaagaccccaatttaagtgccccgagctgagtatatcgggcatccatcggactcgtcggacgcgccggagatggcaaacgcagcgatcgctgggtcgaaggcaatggccattgcaaaacggttacctccgtcggatcctcgatcggacattcaggctctccaatgggcgaagggacgcgtcggattgcgcctgttgttcgtcttgtggcaaccccgggtcgtgtcaggagcgatcgtcgacgcgttaatgagaatcgttggttgccaaccaagaagtgggtgttggaggatgtcgcatccccgatgtggttttcataaacagcgctgttgtgtctccgtaagggaattcgagtcgaactggcccgccttggtggctgctcagaaagaggcgagcgttgggaagatgcttcccaggcttccgattggtaggacgttcttctcgaagagctcgcgctcaacagggttggacgggtcggatgacgctgcgttggactctgctcatatataaacgttcgatcctcaatcggggtctcttcggacgactctgtttcaaaaagggtaggtgggacctcggctttcttgggatagctaccccttttctccacaggggcactggagatagtgttgccaacccaagggttttgccatcctattagccctgatctgaccgttggagagtctgattcccgttcagaactttggccgacatagaacttctttgtcaggggctttgaaaggcggttggaacggtgggtctcgtctttggctttgctcgaatgaatgttgcccatgacttcagaagcagatgcaattcagatatgctctggccagattcaactgggcatgcagcaggggcgagaatgatatacaattagaataagggcttggtgacagtatgatcactgttccccgcacgacgatagggtgacctagccagatggaatttccaagcttgtcccgatagagcttttcagattagatcgcaccccggactaccgacgccaagcaacgccgtgattgatcgcaggagacgtaatccgagccccaagctcgtgcaacggctgggttgggaattgagcgtacgattggcggctcagggttccccaacaatcccggagataatggggaggaccgcgtttcgaattgagtgcgatgcagaaaatggttggactggagagatggacggctaatgacggagagaattgaggtaacgtcgaaagcagatagcccttgggaaccggaaagtccccttcttatccaaagcaggatttgaggcgttcacaatctcagctgccggggaggtcagaccaggtgcccaggcgtagatcggaatcagcagatacacgatcggatcaacattaagattatagacagacaatttgcaaagaacagaaataaaaaaaataagaaaaattcacaaaaaaagagaatagtgggaatagaaattgggcaggatagtgtcactggggggaccacgatacataagaaggtggggagagaatcagacaaacgaagtgtatatgcaactaaacgctagaaacaaaagaagacgcaagcattcttttttttcgccactaaaagacttgtatacgcgcctttgcatcagatgaagctgcatgcagaggaatgcagaggacaaggaacatctccacgcgggacaggtacctcttctgccggaaccgggagagaaggatgtatctagtacgtgagcttagtatgtagaggcaatacattatgaaagtaccaggtacctcattgcacacgtagtatcccaacaactccattgttgctttcttctctttctatagccagtctgccgcaatcgtctctccttttcctctcatcttttccaatatcggatgtcttctcctctatctttgatttgatatacagtaacagtgggatcaagggcttttactcttgcgaaatccctaccctgaccacaccgcattcacagctgagcatctgcatccggcgctggtacggagtagctgacagcactctccccagcttcagccgcatggccgcatcttgctctacgttccccttcctggcgcagtcggagtttgaggtggcatgtcaagatcttgccgatcgatgcattgcagcccaaaatattggctggtccgccattcgactgctcacaaaggtatccctttttctgatgcatgaaccatctaaaccttatttggcccttgttttatatacgaaataagaatggaagaactgatgggaaatatggtttggatgaaactagccagagggaatcggcctcagaataacaaaatgtgtcaatgtgcccaacccgctagaagagccgctagaaccctcagccctggagaacctcgaagaatcacaggacgaggatccggtctgcagaattctagccccccaagggacgtgtccacttgtcctgactcttcaccgcaggaagctctcgttcgcgccaaaccccatcccagcttacagatcgattatgacatcttgttgtcccccacatatcaagtccccgtcttgtacttcggcctcaggtggcacaaccacggcccactcggactagaagaagtctaccagtatgtcgtgccggaacgatacaggcaagaattgaagagtgtgggtgtaatgggtgggattagtatgggtgtaggtgcattctccgaacctcgtgacaagagctcatgtcttttttgttttttttttcttgtagtaccatcctggatctggcgctccgacatttttcgtccacccatgcaacaccgcggatgccatggcgaacattgcagacgcacagagcgtcactcccgggtcatatctcctcatttggcttggcctcgttggtcattgcgtgaacctgcacgttccacgcgagctttttgcttagcagtaccagccaataatcttgcatatgctggaaacgctggggaataaaaaaaatcaaaatgcaaatcgaagactccaagtctttcttggtccccagtagggtcttattcattagattactcctcatcggaggacgcgtccataggcacgtcgctgtcttcgtccatcggggcttcttcgttgtcgctttcctcttcacgcggtcgcttcacgccatggccctctccattagtatcggttgtgggtcgtggagggagtgcaccgggaggagcaccgaagatagacttctggaggtcggtcgtgacgggggctggcgcagtctcaactggcgcgacgtatgtgccccgaagtttggaaatgacattcgatgaccccttgccgtacacgattttctagacatccattgattgagcggggggttgcgatgaccgaagcgcaatgaaaacataccatctgtttgccgaaaaaatcgaatccttgtaaagcccggagtgcctgcgtactagcttggacatccctgaacacaatatgggcttggcctcgcattttgttggtcttcatgcaaacaacatcgagaacggtgccgtatgtggagaacaaggcatagagtgcggttcggagatcctgtttctgaattcttctgtcgggcaaatttgtgcagtagagtctaaaaattgttagcgccaatccgcgacaatctcctgtgcttggaagggcaagctcacgtctggttaggagcgccagtagcgacagccttgctgtcagcgcctccacgggcgggctgtgattttgaagccatttcttggatgattagaaatgggagagattctgccgtttgactgaaggagcaaatgagattgcgtatgggaaaacaaagctcaatcgcgtgtggtgtccattaccactcaaaacctcgacataaaagtagcttggggtcatgtgatgtacccacttactaagcaccgtcatcccccagctcccctcctgatcccgcaactacaacaatcaagtacacaagcacgacggtagagagatcctcctgtcgttattatcaatatgaccgctcctcaggttcaccatctcttccacgcaccaattgcagaccactcgttctcatccgataagaagacacttgctgtcgctcgggagaacaatgtggaactgtatcaacaatcaggcgacaagttcgcgctgagcgatgagctcaagggccacgagaagactgtcaccagcgttgatatcgctcccaacagtggccgaattgtcacttgctcacagggtatgttttggccaacctccttttactatactatatacaatacctaacggttgtatagaccgcaatgcctacgtttgggagcagacccctactggatggaagcctaccctggttcttctccgaatcaaccgtgccgcaacctttgtgcgctggtctccatcggagcagaagttcgccgtcggctccggcgctcgagtgattgcagtctgctactttgaggaggagaacgactggtggatctcgaagcacatcaagaagcctattcgcagcacgatcacaaccctggcatggcacccgaactccgtcctgctggcagccggatcgaccgattctcacgcccgagtcttctcgagcttcatcaagggcattgatacccgcccagagcccagtgcgtggggagagcgtcttcctttcaacaccatctgtggcgaatatctaaacgatactgctggttggattcagggtgttgccttctctcctagtggtaatgcgctggccttcactggacacgatagcagtgtgactatcgtgtacccgagcgctccagagcagcccccgcgggcgatgttgaacatcgctacccggttgctgccgcttaacagtcttatttggaacggcgagactgagatcattgcagctggacatgtaagtcattccttttcagtaatacgacttgcgctaaccgtacctaggactgtgagcccttccgtttccacggcgacgagaatggatggcaacttgctggctctctggagaataaggctagagaatccggaggtgcccgcgaggagtctgctttgaacatgttccggcagatggatctcaagggccaggcccaggcggacaccaagctcaagtccacacaccagaacactgtgcacaccatccgggtccacgaagaagccggcggggttgtgagcaccttcagcagtaagatcaccgtcctgaaaacttgagatgtacgagactaacatattattatagcgagcggtgtcgacggccgtgttgtcatttggaccgtctgatttgaactacgtttgaatgctgacctcagtccatggtaagtatggttatatagtattggatagaatttttcgagtacattctagtctctcgtgacatacacgtagttgtagatctatgtctgtagactgtatgttgtgctccccggtcgtaccttccaagattgatcgacataaaccgaccaatgaggaaatcgatgacataatagagttaccccggattctggtcacctctccacatcacgcggtcatgctctcttcctttaaagatggatttataccctccctcctaccaaattcagtatgttaagccatggctagcattttactccttcctttgctactatatatctgtttcctgagcttcgtctcagcccaaaacaagacgaaccatgtctcaaacgacctattcaactccctggaggagttatcccggctagtggatatttcatactgcgttggaacaacgggagtacagcagccatttcagtgcctcagccgctgcgatgagtttcccgatctagaactggtaaccgtgagtcatatccctagtcaactctaaaagacacacccactaacctaatccaacgatcccgtagacctggaacaccggcctcctcctctccgattcatgcggctacatggccctttcccacaccccctccgccaaacaaataatcctcgccttccgcggcacctactcaataacaaacaccataatcgacctatccgcctacccccaagcttacgtcccctaccctgaccccgaagaaaataccactaccatcccaattcccacaggacagcactgcgaaaactgcaccgtccacgccggcttcatgctctcatggctccagacccgaacaacaatcctcccccagctctccctcctacacaaaaaacacccagattacgccataacgctcgtcggccattccctcggcggcgctgtcgcagcgctagcaggcctcgagatgcgtctaaagggctgggatgcaacagtgacgacgtttggggagccgatggtcgggaacgaggcgttcgcggcattcctagacgagcaattcggactcggggatgggatagcgatacccccgcttgaaggggggatgcgttttcgtcgtgtgacacatgttggggatccggttccgatgctgccgcttgcggagtggggatatcggcctcatgctggggaggtttttattacgagggaggagctgccgccgcgtcgggaggatgtggttcattgtgttggtcgggaggatcctgggtgtattgccggtgagggaaatgagagggttttggtcaagttgtatcgggatttgaatgttcctgttgggttggttggttctagtagcgaggggtgtcggtcgagcggtggtggtatgtctgaggaacaggcagtcttggaacgtgcgtgttcagatcttcctggtcgcgaggatagattatcgcctctccgatgggattggtctcttataccggcgaggtatcggatttgggagcttttttacgctcatcgggattatttttggcgcattggtctttgtgttccagggggagatccaactggataaagtagtatatctatttattctgttggatgctggcgttggttgcttttttactattgatataccccatactgtacattatcaggtaccttgctttacgagaaactcctttctttctctgatatatatcacctatttctaagattacttcagaacaatcgcaagtggagcctttatcaaatcagaacagcggtataattatctcaatatcaacagggcatgaacataaaactagggcgcataactcatgctaggacagagaagaaaagcagcagatatacaaacacgccaaaaaggacaaatgaaacccatcagacaaaagaagagcaacaagaatgctgtgcaagaaaaaaaaatagtccctcaatacatatataaaaatactcaaccttcaaacctcatcaccgcccatgatccaaagacggcacaataaccggcccaaatttaaccacgttcccaagcgccccttcaccctgaaccataaagtccgccgccagactcaatttaccgaccgcggcaggcgggacatggccatatgaaggattaaccgcctcagggtcataagcgacaatagcgacgtagttccgacgcgccatgagcttgcggtactcacggggctggccgttgacgtccgtctggaagatctccatcatgtcttccttggtgtcgctcacctggccggaggatctgtggccgttggcggggatgtagaggggcttgctgtggctgtgcaggagcttgatgatgtacgagggcggcggggtgttgacgacgggcgaggcgatgagttggtacattgtcttgtggtcggatgggtttgaggggtcgtggacgagacctgcgccgcagacgttgacggcgccggagaggaaggtcatacggattgatttttggtgcgcgatgccttggagtgtacggatgagatatgtgcgttcgaggtcctgggttgggttagtatgtatgtatggcttgagggtggatgttttgtgattcattggaaaagggacaaaccttcgactcgtgtgtccattggtcgcgtagctcgtccatcgagttgaattcgccaaatggactcaatataccacccatcagtccggatttacctacggctctctttaccgagtcaaagcctgagccgacgaactccttggcgccgaccaccccggctactgagctggttaccttgcctagtacgttgtatgcgccggtcacggctcgctttcctgttgcgacggtctggacgatgtgttctgctgtctctaggcgggggtagatgaggggcacggcgatcatccagatacagtgctgtacgctgggtggtagcattgcaaccttcgggaacagaccctggtacgtgggaccggccatgacttggtgtgggtttcgttctgatcggcaatctggtccgacgacgacgacgccgggaccgaggtatttaacaaagtgccagcctgtgccggttatagtgaagaggtccatgtcgttgctgacgttacggaggatgtcgagagttgtgtgatgctggaagaggagatacatctcgataccgatgcggccgatgttcttgaacatgttcgagaactgcatgtgctcgggatacgagccgaatccatcgaagctgtgggtatgtcagtgctgctcgtagactgttattgtatggggactcacatgtcatgatcatcgatctggcagacataaggaatctgcgcaaatgactcccttatgtggggttgatcgaagtggctggtgtagtaatggaagtacgcgtaagaaacatcctgctcgttagccgctgtccaaggcgcgttctttctagcctctttcccgctgatggtcaaccactgcttgagagacggaatctctttccacatgcgatccgcatagatctgaccacccagacataactgggcgtggaagcctccgatctcattgtgcttttgcatgatatccctccacatgtaaccgacgccacccagacgagcccgctcaccagcattaacattgagcgagaagtcatttccagaggtagcaatgaaccgccagttggtttcgtatcgaccagcgacaagaaactcgtagcgagtgcaaccaaggtgtgaggtgatggcgtatgtccatttagcaggacccgcatcgtccatctgcaagtcaatctcatacttgtagaatgtccagcgttgatgggcggcaatgttgattgccttcaactgtctcggatttggagacaggtctagactctgatgcatgtggattgtgggtggctgcgcggcatctgtcacaagcaggatagatcccaaccagactccacgttcgagatccatgttggtgtaacgcagataaggaccgaagtagacaccgttggttggagcgtttttgtaaagatccatgccactactcggaggaggcccagagaatccagacattatgggagactgcaggctttcgaagccaggggtcagaggcacacccggcgatgctagaggcttcccgaaagctgacagacccggagaaactagcgggtgggcggtatacacacttcccactggggacaagggcgtatcgttgagattaagcggcgtagggcccttcgggaactcccactgagttgactgtgtgggcaagtggatgtagtaatactgccccgagctgggatccatgtgggcaatccacccttccggaagaggtggtggagatgctggacctgcgccagagggccctggagaagtcacctggactgtctgatgatggaaaccggacaagtcattagcaacagacgcctgaggggattgttcctgtcctgtttgctgttgctgtctctggtcattcgcaaaagcgggatggtcctgcggcgacactgccggtgcaggggaagaggcttttgtagcagggttgggctggtttactaaggccgggtgcattattgcggctcctgctgctgctgttgctgctgttgctgccgccgctgcagcactgcttcgcttttcagcgggatacctattcgaagcagaaggaccggatacactcgagtaggcgggagggggagaggagctaaggcgcatccggtccatgtcttgttccaaagcgttcgggggaacccttcccggctgttcttgctgctgttgctgtagcccagatgcagggtgtatttgggatggtgatccgccgtatgaccctggtatctgaggcggtgggctgctatattgtcctggatgagcctggggttgcgggctgctatattgacccggatgaacctggggttgtggggtaccgtattggccaggatgcgcctgaggcggcggactactatattgacccggatggctagcagacggctgatgatcatcattgacgacctcaccaccctgataaaccgtaggcggcccatgagggttcgaacccggctgctcagtcggagtccacgggcgctgctgctgctgctgctgtgggacaatcggctgctgtcccgagtactgctctgctcgtctctgtgcagcgacgctatgcgacgactggataccctgcagagtcccggtgcccgcaattccagccgcggcatagcgggcctcgatatccgaggttggctgctggcccggtccgacgataggagtctccggcggcgggggcgagccacgctgggcgcgggttgtcgaggtagaactgatgcgattgagcgggccttgtgcggcctggagactggacgggggacgggctatagacgtagagctttggcgctgagggggcgggtagtattgttgacggtaatcatactggcttgtgtttgctggtggctctggtgggccgggtggttgttgttgactggccgggggtcgggggtacggtctcgcggctagggcttcgcggtctggcgcatcgtagctgggagattcgggcagcggctttggggctgcgcctcttctttcggcgagtgttgcgactcggggctcgcgaccgtcccgcggtcgcagcgatgttgggtattcgtttggactcacggagcccgagccggtgccaggaccagctggcggagacccgtatctgatgttgtcgtgatagcgctcgtttgaacttgaggggcgcatctgcggacgttgacgctcgtccgggtagggtagcggggcgtttggtgggggactggagcccgcggccgatgctggggatgatgagtcccgtttgttgatacgtagagggccgacagtgggtgactcttgtctggctgggcggtcgaggaaaagctcctccggatggagggcacggctgccactcatggtgccgtggtaaattgcggctgggcttgaagctgtagaagacagaattcagccaccgcaggatgcgaggtactcccaattacggagataagcgcgaagatcgttgggaacgggtggtagatgcggggtgggaaaactatttcatctattcataggaattgtccgagagtaagaggagaacagaaaaagaaaaggagaggatcagggagattatctgtagccgccaagttggcgagacgccgaccccgcaggtgatgagaattatcacaagttgctgccttgtggcctgctacagggatgtagtacgcagaaatcgaggcagagatctattgacatccagttcccatacattctaatctatggctcggcccgagcagttccatggaagaacggaatatcagattccacatgttcgtttatatacatacagtccatatccatcatcaatcatgctaacatacaaccctgatagtccccccaaaaagcgaatatgccctagtaagcgccaatgctctgtaaaaaagcaaaaaaataaaaacaaaagaaaactccactgtccaatcaaaacccgaaattaaccatctgaagtccctcctgagccatgaggtcagaccaatccacatccaatgtatgacccacatgcatgagtcgctccaactgccgctcatagacaatctggaggatggcacgagtcgttgctgcattgcggcccatgccgtcttcctcgtcttccatgctagtcatcaattccatcgccatcatcttcaatccactagccgatgccgtagcacccgctaggaacaaggggaagactaggaagtgtcgatcagcacgtcgagtgtgagtagtccgttcggccatgcgcaggatctctgttacgtggtggtcgatttctgcgtctgcggagaactcggactcgacgcgttgtccgggccacatgctgctgtaggagaagagttgacaaacatggtacaatgtagcagactagaaggagttagttttttcttcctttgaataaacgcaaaaagtagaaagaactgacctgctggatgatttcccgagatcgccgcgggaggttgtcctggtgttggtgtaggaaggcaacatcgggggattcccacagtctcccgaaagcctgacgcagatctcttaattcctgcgatctcttatcgaactccgcaaagggcaggctctgcttatcatgacgaagccgagcagccaagaacccaagttgagcagctagccggaatgtgtcgtggtacagacgcatgatcaccggtaagctctcatgctcgtcggagtagatcacactgtagccctctggggcggaagggtagagaagacattcagacccagggagcatctggtggtcgatgacggctcgtacaaactctcccgtccctgctccgctgaacagggcgtacaagtcaatgtggcatacccaccagaggataaatggatggggctcttggccatacttggcccgtcgaaggaaggcgatgtgaaggagacgagagatatggtgagaccatagattcgagccgtgtggctcggcggctgcgatctggggattgtaagtatgtagactgagaaattgcaattgcaaccgcttacctcgtagatcaggagcaggaagtgcgtaaggaacagtccgtcggaaaccaggtcatcgttgttccgtatactgacctggagcgaggggaaagcttgctgataatattgtagcgcatcgacattgtgacccgtgccgctgtgcgagagactaagggctgatacagccatcatagcgtgggaaagctattcttcctgttagcaggcatcattgagaacaagaatgcaatacccacaggagggaaacgagtggcttcctgctctaggaagtccatgctgagagtcataaagtgactatccgatccgcaagaatcatcaagcctatggtcgcgagggaacaactgccgccatacgacatgacggaaatgggaaaagatagtagaatcctggctttgctggtccaggcgcaggtccaagaaagtcatctcctccaccttcacatccggcgaaggaagagaagtgaaatttggagagagcgacagattgcagaaaggatccgagatctctgaggttggagagatcttcaaggtcttcccgttaaacggcgagcggcgagtgccatcttcaaaagtcttcaaaatgaccacattgggatcttcgtctctcacgtcgcccttggccgtgctcgtggggctactagccgcagagctcctacactcgctggtgggatttgatctagctcgctcgattgcatcgtctgcatactctggcagcgcggaaaaactgtctggtgtcatcacgacatggtacgtgccgggactaaaggcttctgctttcttttcccgctcttcgtcggaagtgagcaggtaaaagggcggaagggaatccctggaagagaaataatcggttctctcatcattggaacacggcgaagtgactactctagttagtatggactagaaaaaaaaaaacataaaaaaaggtacttacgatcccaaacgacatggccgtccgtcttgacatcggccatgcggcccatgatacgaggggtatcatcgcgaaaagccaggcgcgggcgataatcgcaagtatggcccagccgagtacattgctgtcaagagcatgagtaaatgtggattttagccaagcgtgaaagaatgcatacattacattgcgggtgtccttcatcacatttgactgaagaatgtgagtcagcaacgaaatcggagacacctgtgcaagttgtccaagtcacttaccctttcgactctgaaaacgaagaaaaacagacgaattagttaactgcttcctttttgaattaaaaaaacaaaacaaaaagagactcactcgacatgtcctaaaataaataagcttggattcccggttgagtcaaatatagagacgatcaagacgatcaagacgatcacttaccaacaaccggtacgagatcgtggaggcaagcggatgcgcggtggagcgatcaagaccttttcggacttggcaaaggcatcgaagagatcttccttgggggcaatgatgggtaatcgcaaaggaggtttcccagagactttgctccgtctgtgttgcatgaccagactggccgtcatgaggctgctaggatcagttgtaagtacgggctgaattgggagacttaggggacgtacggtatatcaattcaattgtcaaagatgaaagagagaaagctagagaatgagaagaatagggcgaatcaaagataaaggaaacaagaggttataataagatcgaaagggaagagaaaggctagatgtatggaaaatgccgtttatgggcgcaggtatttggacgggtggcgggaataaagggaaatccaatggggaaaaacagagaaaaatatataaataatgctgaaataattggattagcgcattattccattattctacaggtgaattatgtgggaatcagggaagaccagagagctaaggggaacagaaaacgcaggggaaaacgatcgaaccaaaagccaaaaaacaaggaaaaaacgcgaaaaagaaaggaaaaaaagtcaaaaccgaatggcatgcagatgccaaccatgtggacaggcgaaagtcgaacgttgctattaatatgagattacccaaagctattacggactaaggggaactaggggaactagaggaactagggcagagataggatggccagggaagagacaacctcgggaagtgcccaaggggctggctgaagccacgtcgaacgagaaacctccctttttttttatcggagccgaggaatgggctcaattaggtagctacttacgagctctggggggaaaaggaaggaaaacaacgagcaagtctcgatcggccgcgacccccggtctggatcgcattgagggagcgtgggaaatcgaagagatcacactttggcccattctcggaccagttgggcctctttgggacaagtcgcgatgacttttagacattttgggactctccgcattctaaacggacttggccgggaattaagcgagtggcgcagacttgagaccactcgcgacaatccaactcaatccaacttacccagtgctgcacctaggcggacttctattggcgcgattcctatgttggccctcgtatcgaatccttgtacgaaaaaaataagaaataagcatctttcatgatcgactggtaaataaccttggaagacaatgaaaaaaccacgtgggaatcttaattcgggaacgccaggacctcgtccaggagccgttgcactggtccggatcgctcgctggctctccactgacgaacacaaacgagaagcgtgtcaggcacacccgcttgggcatgcggactcagtttccggtacgccagaatcgcttctgcacgacccttacggatggcctcgacagacccgtctacttcccccgtgagaatcttgtccgcgagagcagtcaagggtgctgccatctggttaccggatgcctccggtgagacgatccacagatccactcgcgcaaagaacgcccggagctcatcgtagaccgtgctgacgacctgtcgtccaccctgttggaccacttgggccagtggaccagtcatctgttccacgtactttcccagcgctgtggttagtgttagcaaggtatgacgctagggggttcccacaattcggggtggaatttaggggctttaggggctttaggggctttaggggaccgaccttcacccgaaccggcggtggggttgaaacattgcaggagacattgtacacatgccgcaagggtgtcgtcctgggtcgagccgcgcccattccgcgagtctatctccatctggtcttgatcttgctcttgcatctcttccaccacccccggaataatctttaatgcgtccggcatgaagtcgaggtccttgcgggcctgtgcgatctcgcccattgcccgcagtccatgcggccggtacaggacgttagctcgcttcgcttcgcgaaccgtaatagtctgacatgcgttagcctcgattttgcatctcgtaaattataatcatgggggaaaagtggcgacatatcagcccataccttcatcaggtgactcagctccccattggcttgccacaacttctgagcttgcccactaaatttcactagtgccttgagcaccacttctttaccttcccacgtcttccccgccagagcccgctccaatacgggccaaaccaattgagccgtcgggaggtcaatctccacatcaagcgataaaaccgcttgcgcaatcgcccgggcggccgtgtgcttgatagcccagcggggggattccaaattgtccgaaacgagacccacaatctcgcgaatgtaaagcgacacggcacgcgatccaccaacgttatcttgccatgtcttctcaaactgctctttcacatgttcatcgccatcgtgcttacacatgaagacgaacggcaaggcgctcgccgcaaatgccatgaaccgatcgttggacagtttggacgccgagtacaggatctcgccggagatcactcgcggcgtggcatcctcggctgttagatagaggttcttggcatagtcaaacgtcttgagaacccgatcgtccgaagcgagtcgcagcagatagcccatggatgagcagtaggaggcgctgacggtgtcgtttcggtccaccacgtacttagtgaggataaggatgaatcgatctgcgtatgggcggaagagcaagcttttcatgctaagcagcactagaacgcggctacagcccaccttcgttggcaggcccacggccgaccgaagcacatcttcgagtctctgtgacagttcgtcaagattgctttcatccacgttgtcaatcagataccgctcaatcacctccatcatcggggatgtgcggatgctagacaggcgcattttgtcaatttcttgaccggtcagaccgtatttgtccgcattgaggtggacatagttgacagcctgtggttccagagagctcagagcactcaggaacttctccagcatattgggaacatatgggcgtagtaagctgccggggctcttcttaattattgacacaagagcaccaatggcatatccttgcacttcctccacgctggaatccagtcccttgtcgctcagaaggaagggaatagcactttggagtaaagtacctgcgcgcttctccgtgccgctggtctcgagtgtgcggataaccgaattggtaatggtttgacagagcttcagcgcagcagtgcggacagattccttgatatcatccagcagtttgaaagccttgctgtaaatctcatcaagatactgggcgtacttctccggacggcgaccttgaattaagtctgccacggcagcgcaacttgcttgccgaacacgccattctcgaccagctagaatgctcttgagaagatcctgcatgatatcatcaaagtgggtatcgatgacaacagtagggtccttgactagtgcttgccagatagtgttcatagacctttgcacgtttgggttgggatcgaaccggtaacggaaaagcttggggtaaatcttagggttcttcgccagatagccatcgacgctggaatcagaaaagatgctgctgattccgaagcgaccaaatgccgcacgatttgtccaaatagcattgtttgaagccagtgacatgaaccggtagaccagagtggggtctcccgcctcagcggccaggctcataatatccttgtaagtgttgacagacgacccttcaccagtggggagggctccaggctcaaatagctgggtgtctgcctcaatcttgccaccaccgagattgggaccagtcgaagtgaatgactcgaccaggtcttggaccaaatcgtctttcagggattggtcgccgatctcataaacaaggctgagcccgtgcgctccagtctcctgcactacctcgtcccggtttccaaggaggctgctgaaagtagcttggcacttacgcagccgctcctgcatctcctgcatgtgaccgcagttcttaactagcgacaacagccagattgcagatgccttgcgcagagatggcttgggcgcaatgcaatcggcaatgaccttgtcacagatgactgcaaataccgagcgcgggacgtctgagcgagggaattctgcatctacgtcgaaatcctggataagagcccgagaatcccaaccaacagcgacattgctcaaggcgtcacccacggtgaattgtacttcgggactgcggatttcatgtagactgtagagtgaactcaggaactcgccgaacaaggtattatccgggccaggccgggaaaaggtcagagtcaacaaccccagagagctgatggggatttgattctcggttttggcgtcacgcgatagcttttccaaaattttcttccagccatcttctgtggtaatatcaagatgcaacacgcccgaaagacttagctgtccaatggcctcttgtgcagtcctttggagcagagtatcacgggaaacatctaaaatatcgaagagagtctcagtaaactgcttgatttgtgcttctggggctcggctccctagaccgcggtacgcaagtcgactcaacaaatacgagagcgccagaattgcaccacgggctcgcatgacctcttgaccaacagcagtattccacgattggatggtagcagttagttgggtaatgaaactctttagttgctcctccgagaaggcaggatgcgaaaccagaattccaaatgcccgtgcagtaataccctggttatcctggttgttgctgcaaataggctccatcaaggatgacgcacgcgagatcaagtgttgaacaacgtcattgggtgctagcgagcagatttccacgaaatgaataccacattgccgcaggccttcgcgctcgcccgttacaagaccttcgagggtgccagacaaaaatgccaaaacggactcctttgcagactctcgaatgtagtttctcacggctgaacgggcctccacgctagtggagagaagcacttccagcttatagtcccaatcttgttctagatctgcagcaactcccgaggctgagaacgcctcccagagcaatgtatttcggaggaatgagatggcaggcataaatgaacctttgtaggggccagaaaggagttgcgacgcggacaaagcctgaacattcaagtgttcctcttggccccctgagccaagcaggaagcgagtagcctcatcgaactttgggaagtcgaaccaggattcgtcttgaactggagctgccgatgaagctgaccatttcccatccttggcaggattaaggagtcggtaccagtaaggatgaagacctttccttccttcttcaacgatttcttgttgcctttctggacctcttgcaatggccatcaaatcaatccaacgggcgaccacatcaccaaacggcaagaatcggttcgcaaagcgcactgcggcatactgaacacctcgcacagcacggaaaccggtgtcaggttcaatatcgccaggctgcatgctcatcagacgaaccaagaatggccgcaattggtcctggaaggtcttgtcgtggctgtccaatgaagagttgagaatactccctagtgcctgatcgatgctgacgaatatctgagaactcgagtcatccgcactcaaggaagcaaagagccatcggaccaggtcgaattcgaagttctctacagcaccggcttgcaacgtaaagtcgaccttaggaaccatgataccaatactctcgtaggcaagacctcgcaagttgaggtctgttgtgggtagtttctgcccgctagctgccggactgggccatccttgggactgaatgaaatccctcagccctgcaataattatgggcgcgattttcttgagatcagacggtgcgcccatacggaccacccaagtagtaaacgtaaaaatctgggtcctcagtttcgacgcttgtaacccctgagaggatctagcagagtctgataggagcccatcttcaatgagcctcaatattcgctgggggtcagccgtagctttgatggacttccccagaaagacgagaagcttgacttggagcggaggccgcgcgggaggagcaccaccagcgccgaaatacaaatcatacaactcctgcacaacatcaggattctcaatatccacagcaaatcgcttcagagtctcatctccaagatcagcaaggcgggagttggcatcggcagaagcgattagtgaaggcaggaatcgttgtggatcttcaaaggcaccgcttccgatgaagcgaagagcggtgacttttgtctcggttaaattcaaaccaccatcggtagaagggttccatgtctcgtttgcgggagcacccttgttcaagaagttatactcgtctggggatagaccgggacatgttgaagtttccttggggccaggggtaagaagtaacaatttcgccagccaaaaggacaagaattgggaatcttcatctgagagaccgagtcgggctttcaggcgctgatcttcttcgctgcccttcgatggcagcttaagaagtggcaatagacgcaaaaccagattaaatacgatagcaccctgagtgggtgacgtcccgatcttcgagataccctggagcaagggcaataggatttcgactctggcttcggagccgaggcgatcaataccttgctgagcatagatgagatcaaaatgtctgatcaattgtgatttttgctccttgaactgcttcaacaatgctgccacaggcagctgaatagagggggctttgactcgggtgttgacatgctgacagaccgagatgattttgttgcgcacctccacgctatctgacccaagcttcagcaacaagggaggcagatatgttccaagcagtgactgcagcttctcatctgtatctgccatggcaattctaaattccaccttgcctatcagactcaactcgcgagcctcaggactctgtgagtccgccatgataaaagtgttgtagaagggtgattccaacaaggcatcaaattgacacgatagaaaaaacaccaagacgatcagatttataaatcaatcaatgatataggcaaccgcactcacgtcatgtccattcaagtgaacagtatggggggcgctccattgattagtcatgatttgattagtcattttccttggcagccgctcgggcatctatatctggcaggtgcgatactaaacgaagtcaacatgaatgagtcaacaataaattcatgtagctacatacgtatataagagaagaaaaagagggactagataagcaggtgaatattaagtctatatggcaacaaaacctagtatgttctaaatcaaagtgggagtctgtctctcaaatcctccattctttgatcagcagcttcgcctctcaagaaccgaccaatctccctttctgcctcagccgaagtactacagtcatccttccgcttgacattgccaaacagacattgccaaaggtcatccttcttcaccatctcacccacgtcgccgcgttgcatcaggtttgcgagagtggcatcttctagttccatcgagtttgcagattcaatagccgcttcagtaacattatcgccatcagcaggagatgtcaagagtgctgttttgacttgcttctctttctccatgatgtgggccaggcgtcgggttactgagatctcatagatggattcttccaccgtgccggagataaggtacatccatactgttgttggtctattttggccaatgcgatgcactcgagcaattgcctggagctcgatggcagtgttgatgagtggctcgcataaaaagacatgggttgcaacggtcaaattcagtccggatgattgtgctttgccatgcaaacaaaagcactcaatctagattataaatagtcagcgtactgcgtccaatgagggatggccgaggttgcttacagccgggtctgatttgaatttctcaatgccacccggagagtcaatactggtgctgactattccagagctttggaatacgctttgtaacctcgacaagaaattcccgtattgagagaaaatgaccgattttgcgccagggtcgtgttcccgcagccataggatgtgttgagctaaagtgtccatctttgtcccgtaagattcctccaactcaattttcttgatctcattgagatggccggagctgatgtcactgtagatcgcattctcggaatgaccctcatggtctaattcgacaaatgtcttttcctcttgtacaactagctcctgtggcttgtaggtgatctgatggagatcattacgcaccaatttcctcttgcacatcgggcaatttttgtgttgagcccaccatagtcgcaagcagatagtacagtatttgtgaccgcacacagtcaacacacctgcaccaaaaggtcagtctgcgtgtgaatttaaatccagacaatactcaccaacttcgaaggtcgattggcagataatgcattctcgaacattactgtcagagctagcatcatctcttaggtgaaggagatatcttgctttagacttgagagaagcaatctttgcttcgataataccctcttgctccaacatcagggtaaaagaagattcatctagcggcttgcctgcactttcctcatcgtatggggccaccgtatctgaaatctgctgcatgtgacgataatactccagtcgattgttcatggtatcgcggaaagttgcaatttctctactcattttgaccgatactttcagttgctcagcgatcatttgaccggcgtttttcagaaccatttcgacgatcttatgttcagcacgagcacgcgaattgcccgaagtggcttgccactccagcgatgttataagtttgcgaagctcactgacaataccgcggagcgatccaagatcaggatcaggcataagctgactgcgagtttccatgatcttcagaaatagttgcggagagggcccctcacctcgttgggcctggacgattccggctttggtttcgtgggaaatgagagtattcttttgaccagtgagagcgtcatgacggtcgctgtacattgacctcaaagcctccatgtagacgtacatctcatcttgatgtcttgttgaccgctcatactcatcaccctctagctttgcatcttcttcctggtcaataagcgcctgagagaccagtccgaccatgacatctcgccatttcttgtattgctcagcatgcttgttaagagcgtcacaaagatcttcaaatttggtgagcagattgtatgactcgattcctttgctgtagagatggggaaccattttcgggatgatcacaaatttcttgtctcgtgccttaatcttgatttctttcatgtagcgctcgactttccgggagatatcagtcaacatctctttccgaatggcttttgcagcctcataggactcatcttcaagtttctcaagcgctctaaactcatccgaatctggctgtgttaaatttgtatcgctcttgatttggtaatatgcgttcgcagtgaagaacactgcaatatgctggacctcgagtgcagctcgaagcttcagtcgacactgaccgaggcggctgttcttgtctgcctcttcgtcctcttcgtcctcatcctcatcctgaatatcctggtctttgtcgtcggcagcgcctttggtcttcactaggcgcagttgctctctgctgtcttcaactagccgagtggcatagttcaatacttcctgccaaatgacgagggcttcttggcggcgttttgcattttctagaagctggcctcgtcgaagctgagataacaggagcgatcgttcttccgtacgtatagctgcctcgttggcctcagtcatggcttccagaacgtgagccacagttcgcaaagagccggagcctaacattcgatgttgaggcagaaaaacgtcaggatagaggcacgattggcggagtcttgttagccaggtacgcattttttcgacaactacagggtcttcggggtcccaattgcctccaaggggggctcccgaggcgtccaaaccgcattcttcacacattttctcaaaaagctgaccgtacctctgttcttctacagctggaaatggagtagtgatcacaatgcgcttttgaggtggtaggcgaatctcatccaatagctgacctttgctatgccgaagagcgattgtgttgatgatttttgccaagactggcccgaaaaacagacacaaccgtttccacaaaggggcggagaagcagaaaggctcataatgaagaaagattaagagaccaaacaggtcgtctatgtctctgcgcagtggggtaccagtcacaacccaagcattctctcgagggatcaagcgagctactttcgctgcattgctgactccactctcaatcatctgagcctcatccagacatacacgccaccatgagaggcgaatgaggggtgtcctcctctgttcaaatcgcttttcgtgccgtagagctcgctgtggagcttcattcgcatagtaaatttctttcgcgatgacattgtaggtggtcagaacaacatcggacttggcaagctctttgaccatcatatcgtcagttgcttctctccaatgcttgatgccagtgtaatgatgaacacgaagagtgggagcatgatctttcaactcttgtttccattgttcaagaatcgcgggtggtgtgatgatcaaagtggcaccaatatgtttcaacccgccgggatcagcttcgacatgttcttctcgcttattcagacttatcaacgcaatcacttcgactgttttgcccagccccatttcctctgccagtattccgcctttcagattatctgcggcatcgcgccactcggaaagatccgttgtcagaaccatgaaaagatgactgaagtagtagacctgtccatcggcatctcttgtggaattgaaagacactggcaggtcactttttggacgttctctaacgggaattatttcaccgtttggcccgacttctcttccttctctttgtaaaagccagcgaacagctcttctctggaatgggaatagcttgcatttcaaatcagggcatatgatattagtcgaactttccgtagccttgggaacgtgaacattcttgtagaattctcggggagaccatttttggacggttccgagcatttcatcgcgtgatttgcgcaggtctgtcaacacagacgggcgaacacatttttcctgcagcacatatcttgtaaaggcttccaggtctgctttccccaagcggttcaaacccggtgctttaatagaatccctccaaagaacaaccgtttcgagagtaaagcttgctccatctggtaaggcacgtaggtgcgcctggtagcaggaagtaggtacatctttgaagaactgatccacgtgagcaagtttgctggcggcctgaagttccctgaggagatcaaatagcctcaaatccttgcacggatataatagcaatttttcttcatcgagactagatagttccagctccatataattgggaccgccatcggccgactctggctgtggcgtagtgtccagatcttcatcgagaaactgaacgcttcgaacatttatgagtattggaacgcgggaggtggagaaatttggggcatgaggccttttgtattcgtgcctgctgggtttctgcagagggtaacggattagttgttttgcttcagagcgggatgtggcaaactactatgcagattgtcaaccgtgctaatggaatgtagcccagaggtactcctgtcattgacaccccattttcttgtgtcagactccttgggccgccccgcttggtcgtcttgcgccgcttggtgggacggtcatcgcattgctggaagagggggtatagagactcgagagtcgcgtctagaataacaatatgtcagtgctttgatttcgtcaagacaaccaggaaacatgattgatacctggtagtgtgatatcttctgcaacgacactcattttgaagacacagcctatcctgtcgccacaatgaagcgttgacaagaagagagaactttacatatgtatcggataatgcctggcacttgagacctttccccttccattttagtgctcacctcttgccgctttttgatcactgagtaaaactgagcacgtctctgagtatcccgacttgatcacgagccattacataatcaactgatctgctcactgagcatcacctgatcatcccgtgagcaccctgatccactcactggtcatcatctgagcactgtgatttgatcactgagtgctcaccgaccgacagctggtcgaatgtaacattcgaccagctgtaagcccagtgctcactgagtgttgtcgcgccggcgacctaagccttcctcagtcggacacttgcacctgcctcattcctcgaggaaagagcacccggtacacctggccacaacagctcccaccccgtaagtactaacactcttacaaaacaccacttctacagagcaccgctgacagaaacatgagcgatccagacgcagaccgcgccgctatgccgcggccaccatcccccgtgagagaccgccagcgccgcgagccccgctcgcccaaaactccccaaacccctactagggcgatttcattgccagcatcggagtcgtcaagatccgcttcacaagcctggagtcacagttctggcgtactctcggtcgccactaaactggagctcattcgaatttcaggaaaaaactgttgggcctgcaccacggccgacccccaagcctgccatgtgttgggaaaaagagacacccaagtgagtgtcgctggcactaactactcgagtagtatgtggctaaaaattactgtgtaggacaacctctgggcccacttgggccttatcaactattccctcaggtcattatcaaacgcgattctgctctgtgcctcgtgtcatggacaatttgatagagataatgacccgggtttccttcttgttccgactgacttggatttctttatcgaatttgagaaagccgacagaatccgaagacaggcgggtagatggcctcccggccgacaaatgccaacaagtggcatgtacaaagaatacctcgagagctcgggcaagggggatgcggggtataccccaatgtttctgaaacattacctacttgcagggtctggagtgacccctgaaatgctccgattgacagcacccaagtactggcaaggggcaccggccgcagcactgcggcgctgcatcatggccctcgggagtggcagaatcgtggctctcggccaccaagttacacaacttgagacgctgagaaatctttatttctctcccattgaaggagcgtcggcaatcaatgtccatagttgcgatctggagccccagctagaccctccacagttccaagatcaaccggcccaaaaccctgatttggaagaacccaaatccgaaccagactccgaagaccaagactctgaccccgagtccgaccatgatacatacgggccccactcaaaagagccggatttcaatccaaacagacagcatgataaccggaagcggcagggaaagggtaggaaccagcagggctctaggaaacaggcgaagcatgcaccaggtgcgaccagacatgctaccggggagaattgggccttaggccccagcgcaacaacgcaggatgccatattgcgctattctccaatcttcgcccgcggatagagccatccgcctccctcctccctcccaatgtcatccgcctctcactgccatccgcctcccaatgtcatctgcgcacctaatgtcatccgcagcccactgtcatccacctcccactgtcaaccgtctcccactggtatacgcagcccctgttatccatatcacaatgtcatccgcagcccactgtcatcctactcccactattatctgcagtcaatgtcatccgcagcccactgttatccgtatcacaatattatccgcagtctatgttgtccgcagcccatgttatccgcagcctatgttatccagacggatttctgacttgctttttgctagttgatctcatgggaatgagtatgagcaatggtcaggcttcaaattgaatttgtttcggggcagactagtgtctaccccgcactttttgcaagtggagaacatgtaacttagtaaattatactacagtctcacagcaaaagttttagcaacactgacaatgtcttcaacccggatcggcccgcgaaggaccctggccccacctagataccgccttcctatttaacctacaccgccatacgatacgcggtataggctccattccatatagcgcgtatatctcgcgtttctctctctaattccttgcttgatactggtagcaacagcgcagcaggcatgagataaattggagctacggcacttagagcatctctctgagacaatgccacaccgggtggaggctatcatcgagagccaggggtggtatacagcatattagattccatagtatgaatttatggaggttttagaccggcagtaacttacataatcaagggggtgtggggccaggcgttgttaacacttttgcgtagtcactgtaattggaaccctaaaccactgtatcgccgtcggatcggaactgaccgatacgaaggtcaagcagctgaggccgtcgcgttgataactccctctttcattcctgtgttgtaaattaggaacaagctcaccagttcggaggatagtatcacgggctgctgcccgaagtgaagagagatcaggttatggtgtatacttctgtggtaacttccctctgttccttttgaagaagactaatcagaagccctatatctagcctgttccgctttgtatataatgttgtaaagtaatgattcgtgtggttactagctgagccgttagaacaacgaacgaatggcaattcctctcctactacattctagttattagaggctatatattagtaaagatatagtaaaaagaataagaacgaatttacttacctggtggttgaattttccgtagaccatttcgcaggtagcgtctgcttttttacaagcttttctctccaaaaatttctgtcgaagagcatcgtagaaactaaatagttgttagctactaataaaatattagtaaaataggtcgcatacgctaccgcttcacgttagggttgcgaatattggtatgactgtcgagcatccctctttatagagaacatacgccctacaagctcttcattaacctctgtatgggagaggttacggagatagtcgttaagatgaacacagtgcttcatgccggaatagtaagatgctgtcttcgtgacttggcaaccaaggaaggagcagtaaatatcactttttccgccatcacgcctactagcgtactggacctagtaaaatagttaataactagtataatatcgatgattatataacaacttactagattaagtgcatttttcttctcttatgaagagagatgtcggagattaaccacatatgcatagcctttcggatgagtacgcggatattctggaaggagaggtacatattcaatctctgtagtagatattgcgtcgtgggtagcttctgttaggggagttggttcatcttccgttccctatttgaaaaatattagtaacaaaccagtaggaaactagtaaatttcttcaaaaacatacctcgtattcgttgcgctcatgcaggatccgatcatcggatgcattgtaaagctcgacatctgcctctgcaggctcgtctggttcaggaataggctcggcctttataagctcttcaagcttatgatagcggtgtttccaccaggtagattgataatgcgccatggtaactactagtaaacgaattggaacaatggtttgtaagtagttatacgtgcatatccaaagatatatatattcgatgtagagttatttatcagtaattaggtagtaaacaactagtaaataactagtatacaagaatgtatcccttgtaaatataccacatatttcataccaaaacgggatgatctaatcaaagataccgtacatttccagaccaaacagcatttacataagcctaaactaggggtatcaacgtgagcattgaccgcctgaccaacgtgaggtctcaggcgggcccacatgacctggtctctcccggacgatacctgaggcggaagacacctgaggcatgcggaaggatgcggccggattatataagagacggctgtgtatgatcacatgatccataaccttattagaggccggaaactccattcatacttagattcctcaagtatcttaataacagcattattccttatcgatatcattatgactttagtattagacctttatatttaagatacttcctctatgttggtaatttgaggggtggtgcctctaaattatcgtattataagtacaggcccgttcaacacagcgctgtacggtaagattggaagaaggcttggcatttattcggctgaaatgcaggaactcctcaggagatcgcatgatcgagatcaagatcggccacgtttcccctcttccataaattaatagatcagattgcacctttattatacgcaatcttcctcgcttagagattgtattgttacattcctttatgctaatctcttgttattacgttattgatgttgtttgttattaactattattgtaacattgttattaatgctcaatttgagcctcgattgcttaaatactttggaagccaatttcgaatgttgctgtatcattgcagacctggtcctcctagaagcaagcggtcctcccttgtgtccaatggattatggatctctattccagtctcactaaccttcaaagttcaggctcagtttcaacagctatgctatgggctacataatcgtccttgcatttctgatagatttccttgatacagtgataaggtgcacttcagtatagtatatatacgttatacaaattttaaagcactggaattcattttgttttattaataatagtaatggcagtttttactagacgatacggtttctgcctaatgaaaaaaaaaaaaaaaaccataacaaataaacagacgagtgcattcctcgggattatacctgggggtgtgttggatatggtggtcacctgaccatcagcccggtacggcaggcaccaacccccataactagatagttaggcattctgccctttaggaattgacaactctctccctcttcaatcgcatcactacactgtagtcgcatcagtatataatccagtagtatcctggactccggtagtaggcttgagtgaatacagaccggcgcgtgttgacggagtcacgatggaacctatggtctctgtggccatggcaagaggactaaacccagcggctacagcgaccgcagagccagtggatgaggccccgggagtctgcttagtattagcacaaaagaatggcatctttatcctctatcttcccaacatacggcgacagagtctgaccaccgtgagcagaccaaccgggcatcatcatggtcattttcataccagcaaattcctagaacaacgtcaatccaataaacttccttattaaaccgaacatatactaacagtcatgttagcctttcccaaaataatcaagccagcatcaatcagccgctgagtgatagctccgttctttgacgccttggctcctacgaacgcatatgacccagctgtggtgctcatgccaagctccgatgctgtgacaaagcaatctttcagaactatgggaattccatgaaaaggaccccaggtttgtctggcgctcctcatcacgagccttggcggttgcgaggactttgtcccgtggggcaggagagattagcgcattgagtgcaggctcatagcgatctatttgtgccaaatactcttccacgtcctgagcgctcgtggtcttgttctcatcgagtaggcgctgcaggtcgaccgcattggtcgtgaggacgttgatggtcatttctgcgctggaacttgagattcaggtaaggggcaaattttgttactagtgcctttgttggtgatattaattgtagcatcgtgtgagtacgtatatatagatcctgctgcctgattgcggagcgaagcgaagcaattatatcgcattatttattctggtagccttaagggtagttactgataacatattgatacttcgagattaccgaaacgttcacccgttgtcaccgatggaggcaacatctttgtatcaaagccgctcgagaaagcaactcatctagctcccacattgtagcttgcaactgtgtggatagcaagtggtgaaacttagtggctaaagtaggacacacagcaattgatcaagtcccaggcaccagaaatgggactggaattttctttcaacatactagtagggatctttcgatctggttgcagttcggttgatctgaggcgctggccccgcacgggagcccgatggacgacaacttgaggatcgttgaatttacattaactagttaattgagtatcattgacagactacacatagaatatgaggacctgtagaattgacgacgaaaatgaccgctttcaacgctagaaaaggatacgattgtcacgccgcttgaccaaaaatttctctcgtgtctgatcagatatataagaccttttgatgcctagagtcagtgccaatacaaccaaatcaggaaataataggatatttgagcaggtacagatgaaaggaagttgaatatagactcgaaaattagcccgctacgtaactgcatacatggagcaaccaactaggaactcgcctagatattattccgtaaattggcgaatccaaaaccagaatatgcagtcacaattagataagaatcttgaaaatatgttactattcctgtctatgaaccataataaccggttggggcagtaatgagtatgacgattaagaatgacgtcgtgctatgttagacagcgttcaacctcaacataaatagtgcctgtttccggcgatatagaacttttcctatactcagcaaaccaagcaaaacttactacaatcttaaaccaatttttatcttctaatcttctatcttcaatatggataccgtcaaggttggtggattttctcacacctaccctaacacaaactcacatggatacagaacgccgccaactatgttgccgagaccgtgcagggaactggcgctgaggcttccaaggagaccaacaagcaagtcgcaaaggatgacgatgccaagctgagcactcgtgccgccgctgcgaaggatgctcttgtcgacaagaaggatgagaagtctcacgatgttaaggccgatgttcacaagggtaagttcatacacctgatacctccatagtcagttacttacaattttgcagaacaagttaagcatcaaaactaagggatattgtttggtatgggtcgatgttacagtaccaattgctctcccctaatcccgcgggtcgggtacgaggcatatgttcatagtactagtagaagaatacgcttgtttttgagtggaggatgctgttccgccaatcacattaaatgaataccctacttatttcatttcaacgaattggtgctttaataggtgctttaataaccggctgcaagttattttcttgcccgaacttcagctttcaccactataggatttatactatttgtactatgtgtctatacttatttattctactgatagcttggaaagcatggttgaagatgcatgtcggcagttgatcgtttaccaatataattctcttcaaacagtcttcacacaatatatttctatatgttgcgggcttattgctcgcgtctgaaaatctatatcgatgatacctattctgaattcggcttattatttcgcgagtgaaactcacgttcctaggattatatccggcccaaggatctatagtatggtttctaggcacgctcttggtcgttcctaggaatcggactcgtagtatttctagaatgtacgatcattatatcgcacatctcaaaagatcgatcgattagtggtcatctggacaagtaggatagcttatgacgtaatgtctataacggcctttcagtatcccttggcagtgatatggttcgatgacatcatggaaaaattcgatctaccgccaagagccatcgggctgtagaaactcccattggacactgccttggaaatcaccctcgggctctcttgctgtgtaccgaatttgatattatttctaaccccttgagaaagatgttctcctccaaacgcctgaccgctggattttcactatggccgcgtccgaaggtgctgctgtccagtcacactatagattggcccaggaacgggaattctacaagtaagacctttttcatcctggatcgcgtccccttgtcctccacaggtgatacagatactgactgatatggcattggggcagatatgttccgcgcgaactttccgcatcgcattatgccccctttgatcatgccagcgagaaaacgttcatcccgcaaccgtcgcgggattcggccatgacctccttcgcccagctaggcgtcatgcgtctaggcacccgacgagccatgatttctctattcgataaaacccaccaacatgtcgttgcagaggcaactcggacattgggactaatcggtgggagaatccgagacgaacacgaccggcttcggctaggttgctgtgtgctcccgaaagagaggggcatttgccagcacgtcgaagatttaccctctaaggaatattcagaagccggcgaggtcctcgaatctcgttcgctggttattttggatatgacgcaggacgaacggttcaggtcaagtcaactgccgcacgcgttgtctgatgtgcgcttctatgctgcagtgcctatcgtgagccctaaagggttcacgattggtgcctacagtgtgatggaccacgagccaaggacctcgggtcccgatcaacatgatctgcagtttatgaaggacatggctgcaacgatcatggaacacctggccatggatcactccactcgcaaaagtcgccaggcggaacggatgatcctcggactgggaagtttcgttgagggcaggtcgacgcttcgcggatcgtggcgagaagccaatgcacagtatgtcgcctccgaacagtccggggagaccaccgagggtcaattgaatattcagcaacagaatctgcaacaggtcaccaaggaaaagattgagaaggaccttgtcatccgccagcattctagggttcctaccaatgattccgcatcgaaaagtgatagcaatactagaggcagacaacagccgagtgtagaggtcaacaaagcgaatgggtcggttcgaagcgtccttgcgggcgaaagtctacaggatgactctcttccgaccggcatcaaacacgttttctcgcgcgcggccaacttgatcagggagtcgattagagctgagggagtcatgttcctcgatgcgaatagcaaccgttttgggagtctcgtcaaacatagccggaaggtttctggccccagcttaaaaagtccgacatcgagtagtgacgaaagtaccgattctgcgtcttcccaacgcaactataccaagggtaaccagaagggtgagaagaacaggaatcttgtgtctgaatgcatgggcttttcgagctcgagggtgtcgagcataaacgaccagacgagggccggtcaagcagttgtggttccagagcctctgttcagctcgttgatccggcgatacccccacggtaaaatcttcacttacaacgccaatggaatggtttccgaagatagcgatccctcacggaatctgtccgagcctgatcacgtcccgacttccggggcgcctcgctccaaagaccaatccctcgccagtaaacggcgacgcaagccaacattccaacaagatgccaatagtctgataaaaatcttcggtgatgccagaaatattttgcttctacccatatgggactcggaaagaaaccgatggtatgccggaacactagtgtggacgaacgatccggagcgcgttttcaccattgaaaatgagctcgtgtacatctctgcttttgttaatagtatcatggccgaaattcgtcgactcgacgtggaggtggcggacaaggctaaaaccaaccttgtcagcagcatcacccacgagcttcggaatccactgcatggaatactgggcacggcagacattctgagtgacaccgccatgaatgctctgcagcatggtatggtccataccatagagtcgtgtggtcgcaccctccttgataccatcaacagtctgcttgatctcacgttcatcgacaagtatcagaagaaacggtctcgcatgagtgggaagccgcgagagaatcaatcgagtttaccggccacttcgaccaaggagggtcgcatgcaaagcaaagaccgtggcgagaatatttctttctcccacgtcaaactggacgcgattctcgaggaggtcacggagtgtgtgttcgctggatacagcttttacaatcatcccgaggcgccgcctccagccttggccaatctttcttcgcggtgggctggtccagcgagcacgtcggatcaggttggccctcgagctagccaagtcacgatcattttcgacatccagccagatacagaatgggacttctggacacatgctggtgcttggcgtcgcatactgatgaatgttttcggtaatgcgctcaagtacacaccctcaggctacatctaccttgggttgaagtcatcccagagggacacagagtctggtggagaagtgccgaatgatcaaggagaggaatttgaggttactcttacagtgaaggacaccgggaagggtattgggcccgaatatttgcaaagcgaccttttcactccgtttcaacaagaggattcgcttgcgtctgggagcggactaggactgagcattgttcgccaggctgttggattgctcggcggctcaatcgaaattgaatccacaaagggagttggcactcagctctcgattcggacaccactcaccccgtcatctggtccagacacttcgtcaaccggctctacgtttagttcaccacggaaacatactcagggcaaaacaatcggactcctagggttcgggtcatctctccgctctcaacgagacatcgtcttgtactcatctttggagcggctgtgtcgggactggtttgatatggaggtgacaagcgtatcgtccctagagggcgaaaacgtctcctttgacttttacttggctgtgcagacggaattagactctgagcatgttgaaggaagaaacctgttcaattttaaaccaggtctcaccaacggggatggtcgcagctcaccggttgtggtaatttgtcaatcacccgaggaagcacacagaatgttcgttgcagccaagaaccggggcgaaacgcctctcttcgagtttattagccagccatgtggaccccggaaactggctcgggcattggatatttgtatcaaacgacaactcgaccaacaatctggccggcctaatactgatgagccgactcgctgggtagaaatgcctgagtcctcatatctaccattagacattgcagctagtgacccacccaaagataggatgaagatcggtaagcgaccaacaacggagacgatgcgcagtccagaaagtcggatttctcgatccccgtctcacaagggaaatttggaagacgatgcacatgccgcccagccgacctcgccttctaagatagaggcggaaccagagacccccggaccatccgtccttctggttgatgataatcatgtgaacctccaattgctttgtgcctacacaaagaaggacaattatcattacatgacagccaagaatggggaagaggcagttgaagtatataaagcacaccacgggaagtttcgggttgttgtcattggtatgttcaaagttcgaacttttctttcctggatttggtttgatgctgatcaattagacatctcaatgccagtcatggatggccttgaagcgtcccgacaaatacgtcgcttagagaaaggctatcgagccaagatgaccgaatcggaacaacaaacaacgccccccacagtcatcgccgctttgactgggctcgacaatgttgaagcccagaaggaggcatttggttctggcgtcgacactttccttgttaagccagtcaagcgccgagatttgcaggccattctacggcgaatgaacgtagagtgagctaattagcaccactttattttgtgttgtcctcacttaactgcttgaggcccggggcctcgatgaaaatacaggctgttatctcaagccgagggaaaaggtattacactagcagacaccctttcggaaggataattctaatggagtagtctagcttatccctctatgaagcgaaatccgattctgccaggtcaagagtggctagacgtttacgaagatctccacattccgcaaaggcctcgatcattcatctcggtaccgactttctcagcattctagatacctacccagagtttatcaagattttacagcaactggtcagttattctttctctaccaattccaattcgaacacaacttcgaatttccacaaccataacaacctagaacgtctgtatagatctcaccgtcggttcaatcaacctagaccaagcaccccttgaagctagtgacgacgacgatagattcgattacgaccctatcgtcagtctctcagtatctagagagatagaatagaaaagtaagagaaagtgaggaagagcagcgaagtaggttattggggcgctaacccaaaaaaggcaacactaacttgaaaaggcaattcacaggtccgccgtttagttacatggtcaatttgatactaacaagattagattagcgcgaaatattccctcacaaaagaagcgtaatatctccgagaaagagatgaccactcagattacaataagagagacctcaaagagccgtaaccctctcatcctggcaaaacgggcatgcagtgaagtactctgccatgtccacctggatctgccatttcgcaaagcaagacaaacaagagaaagactggacgatacggacccttgtggatgcagactggggcaaccacctctgcgagagaaggacgagatcggtagcaaggccgggggcttcttcaagcagtttctcgaatcccttcttctcgcgcagctccctccggtgtatctgacaaaccgctactaccacatcccgaagacctcgatccaactttggtgttgttttgtatgcctggaaagcagcaaccaagaattcaaccgagtcccagtgatcttgagcgagagtgacgaatgttagctttgcttgaactttgagatattccacctcgaatttgtcggcaatggagtatactttgacgttgaacaacaggggacacatttggtgctcgggttcgttgatgtcgtagtgtagtccgtagaaggagcgtatcatggcttccacgacgcgtggatgctcgtcctttatttcgaatacatgagcatcctcgtcgctctcctgtatcattaaagtcagctgggcgcgtggataatgaagggcttgggctttggaaacatacactggagagatcagcgaaatgtctgcagaaagtctcagatctgctgcagactacgattcggtgcacgctcaaaacttggtcagcggtgtagattgtgagatcggagaagatgcctgtacggtggaaactgtcttctgtcagttccctcattcatacaatgtgtagactcaagaacttactttccaagtcgatggacaaaccgatcagtgccctcgacgctgttggaagtgagttccatcgcgaaggcgtgttgtggctagctttgatgcgaaaggaacgcgaagggaaatatgtgaagaggaaaggtaacgttggaaggattcagacctttttgggtaacaacgataagtggtgtagcttttgagcctcagcttgcaaccttcaaaaggcaggcacagcttgttactgtatctagtttagacatatagtaactaaaccctacgcgtcttcggctacggagatttacacccctcatgtattccgtgggacttgtcaaatggcaatgagagccacgacttcagaaacgtccacgagaaagtccggttttgttgtttaatgcagacctacatggacctcatacatatggtaatgtcatggtccctgtggtaggtgaagcagcatatgctacggcaccctctgcctgcgctgtctcttgagctacggtgaaatggtggtcagagagatggggaggagagaagaagaagagaagaagagaaatggggggaggaccccttttataccccaaacccacgtgccttcctcgagtgcgacaggtccctcgcatcttcctgtcaatggcacatggcaccttccagtttacattgtttgccttttttgtttatacggggaacttccaaggtgtaggaaggagccatgaagccaatatcacattatgctaattccttgtagtgcaattttaagtaaacactatagctgagaatgcaccttcatattatgccattttctctagtttacaagagctccaggtccctttccaagtatcgccctcacactgtctctcccagtatccctatgatcttgtggagaagaagccgaggtcttgctatcagggtcggtgtcatatacaacggtaccattgactgcatgaacagatcgatagtatgaccgcccattcatctcaccttcgaagacattgctggtgtcaccccaagagcttgagtttccaccagtgacggatttatactgcgccgtgccagattgacttgtgtgtaggtatgatggccccgaggtcaaggtgtaagtagaaataccgagacctcctgttgcctcgtaatcaagacccctcttcatccaagagtcaatcgtcatcccactcgaggtgatgccataagttgcattgacagccagggggtactgaaacgcaatgctgtttgagatgggtgtgtctccgagctcggtgatggtattattgccagttgtaatttgtctgttaaattgactgtatccttgctggttgaggagaccgtggttggagaaggatagtgtctgtgaccacgagtacagagaagaggatgctctgaaaactcgctcgacaaccacagagtacgacaaggaatcatttccgccggtctcattgtagataagattccgagtcacagcaaacataggcaagggagcatccaccgtaggtccatttttgtcaagagtggcatttcccttagaggctgagctgtcgtcatcgatatatatgaagatatttcctgtgacaacccaatatgagccgacagtgttggcaaatgtggccttcccatctgccgagacatccagaccagtcacccggatctcaaacgagtgctgctttccgtcttgaatcatggggagaaatggggaaatatcaatctccggctgtcgaagatcaaatgcatcagtgccaacaaccggacgccagaatcccggagccacgcctcccgtaaagataatagggaatggccagacaaggccggcaaggatcccatcgatatagagctgaacttcacgaaaaggagtgtacccatatagcccaccgacagtgctttcaaagtcttgggtatcttcagaaaagacattggaccaccagaactcttcttctgattgtccacatgccgatattgacacaacagcacgcgatgccgcagcagggatctcgtacatgactgttgtgttgtctgtgggaagctggaatgcacttggagagtttgatgccgactttttggccgagattggaagaatcatatccgcagttttgacattgtgttctccagagaagtgcgcggttagcgtggcattgaacgaaccggtataaatgtcgttgatgatatttcccaagtcaaatatcagcttctggggactcttccatagtgaattatactgtgacatctctttgacataagtccagacgatcccattgattgtcggctctgccgttgaagtccggaacacttcattgtctccgaggtacatgagtgccaggcggtcaaattgcttcccccgggaggtgactgtgaaattgattcgtacagtatcaaagtcgcagtttggaggctcatagtcgcctaaatagttgcaatattagactacaagtagaagtaactctcgagacctcttaccaacaaacggtgctccataactggctccaaaaacatgatccatgagcaatatgtcgacatcgcagttgccgtttccactggaatcgagcgatattggctgatatagctggaaaaactcctgcaaaccagtagagctaggtgcctgcgatgaaatgccagcaatggactgtaatccgcttcggagcgaggaagccgatgggagatgcccaaaaagcaacaacccacatatggcgaacagaaccataataactagcaatccaaagcttggattttctcttcgcaatttgctgcgggtgtcgtctacccttatttttaaatcgtggtggtcaatagaccgcacagtgtccgcagttgtgtaagcttcttggggcttcaatgcttcttgactgagtaccgacctgcgatgcgatttcaaaacattgaaaaatgcgaccgcaatgcagaaaagaataataaataacaaccatgcagctagctgggtaaaacaatactccattgggaattgggggtccgttagcggttgaaacgagtgccctggaggaactagcatgttagctccgcccgtgtgagccagttaggatattagattctatccaagatggtgccaggctaaaggctatgtaaccttggaagtgactcttgcgatgcaatatatgaaggatgacgttgctgaagataagatgcataaagaggggaaggtgcggcggagttccgacgcaagcccagggctagctatgtaaccctaatatcactattcatacggagtaatgaacggttatcagtccgaatattgatagacctcaatgcttcgaccttgactgttaatgtcatggatatttctcgggaggtaaagtcttcaagaaagttgtattttgcaacaagataacattattggctaatttgacagctgtcacttaggtagaccattgtggtcatttttgagttgagcaaataccaatctcggcacagcagtctatgggaagctatatagatgaaaataattgaatccaaccccaagaatgacagaatctggccgcccaccaggcaccaatcacatatgtgtacggctttggggcattcaacttctggtccatcaacacccgccactggggccctcagatgcggagagaaaggatggccgagataccctgaaaaacgcgatcggagcaatcatagtgcacatccatccattgccgatcgcattgagcatgggttgagtgacgacggctctagtgcatgcaaggatatttcgcacaaaatttgccacggcaacaccgctagatgctttcttgggagtgaactccgtcagagcggtctgcacagtgcccatgacaagcatcatgccgagcccgaagcagatagaggcgacacaagggaccgcccactgcacacccttttcagcggaccagccgtaccaaatcaacgaggctggatacagtgtcaaagccagccagatattctttctcatccggtcctcgggaaagtacttgatcatgccgttatcatcgtagcgattgggcttggttgcctcacgaaccatgatgtggttgatccagcgaccaccaaaagttgacgagatagcgtactcgattgtcggtgctaaatacacaagacccacctccaaaatgctgaaattgtagagggccttgccgaagacggagacatccatgatgtacatggtaaagaaggcgatgacgctagaccaaattacgacgatgacgggctggaagcggagcagggccaatgccttgaacgggccaaagatggacatgaatattttgacgaaaatgctggtgctcttctgcttttcggtctacggctttggctcacgctttgcgatcgtctccggcaaacacaggaaaatgaacttcagcatcacaccgccaaagatggcgagaaaccagagggtacttcgccagccgagaccctgatttaaagcaccaccgatcacgggcgccagaccgtgcccgcagagagggcccagttggaagactcccatagctttggctcgtgctttcggatcccagatatcggcgacggttcccacgcccacggattggacggaagctgcggctccaccgctgagcactcggaaaacgatcaacattgtgacgttgacactgacggcactgatgcaggagaaagtcaagaagagaaaaaaggagaggagataggccgttcgccgtccatgcttctcggacagtgcggacctatacttcgtggttaacaagggtagctctcatttctcaatttgcaggtctacttaccaccagataggagtgaaatccatggcgagcaagtagagtgccaccgacaagtttgcaacggtcggagtcgtatcgaggtcatacgctacctcggccccgctgtgattttatcaatgggtaatcatccacaaggaaacaagcaatagcacccacggaagaagatagaggagcccgtggaggaagtaatggcagcgaggctgacagtcacagtcatcgcccatttggttccattcccatattcacgcgggttggtgatctcaggaataacggagaatccgcccagcaggcctcgccgccccgagcgagggacaacaacaatctctggtcctatagtgctcgctattggttccactttccctggagacttgatgggctgagtgggcggagactctgtggcagacatttcaaaatcgcggttgaggttgagattgttgatggccacgccagggtccttctcgtcacccggcattcttccggtcaaaagtggaaattggtgaatagtagagctgggcggatgccacgatgcttatacccaggcacattgtgtatacgggttcttcggggagataggtcatttcccaggacagtaaagccgagcaagaaaatgccggggtggacacaggccagacgattttagaccattgaagaatgtgaccatgatgtactccatgaacgggagaaagccaaagaaaagaaacgaggacgtttgatgtccgggcgccgctacactagtgagcttggtgcgcctatcgccggggctgtgcagatcccttgggtactttaagtattccccggggccctccacgcggaaaatcaatacatttgaagtcgcgagaccgctaaacacgaattgtgtatatgatgacacatatttccagaaagggagaccgacaagacataggagggaaaatagttctgtggggatcaagatcgtactgatagataacaagcatcagtagctttctccatggagaattcggcccggagatactaaccagaaaatgccgagccgaccctgctgggtacaaaaggtgcctaacacgctcaatattgattgactctgagataacccgacacgatgtccgcttcacgccccacgatccttatcatcggtatttcacgtggccttggccacgccatggcggtcgaattcctagaaaagggatggaatgttgtcgggacagtccgcggagagtcgcgaaaattactccacgagctagaagacaagtacaacggtctgattgacatcgagaccttggacatttgccaacccgatcaaatccaggcgctagacaagtgtttgtcgggaaagatattcgatatcctctttgtcaacgctggaacaacgaatcgtgaccaaacccaaaaaattggcgatgtatcaaccgaggagtttgtacatgtcatggttacgaatgcgctcagccccatgcgtgtcgttgaacgtctggcacatcacgtggctccgaaaggtcttattggtgtgatgtcctctggacagggaagcatcagcaacaatgaaaccggtcagcgagaggtatatcgtggcactaaagccgcgctgaacatgtacatgcgaagctttgcagctcgtcaggccccatcacgtccaatggtggtgatggctccagggtgggtcaaaaccgagctggggggtgtggacgctcggcttaccatcgaagaaagcattcccagcttggtcaatgtacttattgcaaagcaagaacgacccggactcgaatacctcgactacctcggccgaactgttccttggtgaaacataatcacgtggctatatgagccttcatttttgttttggccagagtctcccttttttctttcttgttccttctttagatgtagattctaaatcatatcaaccgtgtttctcgatcagtactcactagaacaccaatccattattgtacatctagataaatcaatataacactaatttaaaggctatacacagaaaagtcctctgacggtttatgctttttgtcggtcttatatatatccaagaagacatctacgaagagattcaaaaagacattcacaaagacgactacaagatacgttcaacatggcacggtatattccttatcattatcttgatcttgcatcaacccactattgacctttggtccttggaacgctctgagctcttgttttggaatctgagaattccgctggagtccgtataggctgccagagtagttctgtcgcctttttttcgagacagctcatcaaaacgcttagtgacgacacatctcttgtcatcacgcttgaggcagtctgcctccagacgagtttctacggcccactcgactgcgaagcgacgttctcgcatcgtgggtacattgtactcttggtgtgtgctcatttagatgttcaacgtactctcagtgtgcactcagtgcgctctcgctgagattttcaaacttaatctcagtgtatgctcgttgagatgctcaatgtgccctcgacacatgatcattgtctgctcatcgagatgcccgcgaggcacgtggagacatggtaggtgtcgagcggagtgtccgaattggcgcaagcagaccttttaccaaggactcagcatgatcgtgggtttcttgatctgattgtaaacactggagatggcggacgaagttgactctgtcatctggcggaaggtgagtgtggaaggcttgcagaactcatacagtgttttcgttctgactgattggttggtagctgtctactttctccatcttgccagtggatgttgttcttagagagatgctgttcttagatccagagtcaactggaacccaaagatggtgaccggagctcaaatgggtggggctgcctatctgggtatagctcccgcattagttgcagatcatgtgatatataaaacattccgaatgcggccttatcacgtaacctttttttctattttggtcgtctctttggtcgtcttgtattggtagtcttcttaagtcttcttagaagtatgaaggcggtaaaaagcataagtgcttagcattgtctaaacctatatacagcaacatacatagtacggccagacgagtagagagtatagtgtaaaaaagaaagagaagttgtaagacatcaaatgtcctctgtaaagcaagctaaaaacaatcactccatatccaatgcagaccattgtaccaattcacataaacaagcgccaggcaccaagaataagggccgcggtaccggtacagacacccctagagagagaaagaaagtcagcataatctcgcgcggcaagatagttcggggatcatacatgagccactgcaacgtcgagaacttgacagcctcaactcgttcccttaatcctgcaacctcctgttcaattctcgtttcggtctccttgatacgcatttcctggctatttgcctcctcacggatccgacccttctcaaggttcagatccagccgaactgaagcttgtgttcgtccaatctcgtcccggagccgggagttgagtttggcgaggtctgccgcgatcttctcgtgcgatgaacgggtcaattgtgcctcggtcgagtctgcgttgagtagctccgagcgcagtttggcaaagtctactttttgtgtataagttgatctctccgagtctagcaaagcgtttctcgttagatctccggcaagcactataaacgatgcgcgacagagccgcgttcacataccttctcggaggaccattgtcctggtcagattctggattgactcttggatgatatcgttcaatacccgcatcattgctacggactgttcctcgctgaagccctccgcctgtaggcgcttcacgaatttcagggtatcgaagtgatgatcgcggtgctggactgctgtcgcatgaaaggcgcggcgagcaggatggtagctagccacatagaccccattgtgtcggattggattgccgcggtgaggtttgggcgttgccggcgtggttatagaggttccgcgggaaacaagatatccggagatgacatcccgggacgatgtggtgatgagccgggaagactcgaaaggtgggattagagaattaaattgtcgcttggaaggactccagccttggggaagtggtcgtctttgacttgtcgcaagcgcgggctggtgggtgatggtaatggatggacgcgaaggggagctgttccaactcaggcggggaaggatagtgcgcgggacatccgcgacatgtttttgagacgccatgtcaaggacagcgggccaacaagtatttgttcaacgagtgtactttaaaccgatcaagaatgacgcagaagagggaagcttggaagattccggggcttgaaatgtcgggatgactaaagacctcggaacgcttccagtttcccggcccattacccgcattgcctattttattgtggagtgaggtgtattctcatttcatgcaattgaggactatttttatcgaacttgactaaagcttctttcagaaaatatccaaatcagacttcacatgtaaacgctatcacaaatctatgccttttcggctactgtcaacctcttatctataagtcaaacagcttcttcatctgcttgatggtgtcgtcaggaccagtaacggcatgcccaatggtgcgagggtcctcgtagatctcataatcgtttcctccgacgcaagtcttgtcgccgaagaagtggatggtcttgtagtcgacacccgagatgcccttttcagcttcgacgtgctgtaggcagtaggtcttatcccaaccggtagggaagacatcgaaagagatctgaccgccgatagagtagctatattagtagattgattagtaccatattaaaagtaaaccttgccggacaaagacttacgtgagaccgtagtcggggaactccttcctcaaggcctccactagggtctttctgatgttgtgaatcttgtcgaaactatagcataggtcagtcaggcagtccatttatgtggacatatagaagatcagcccgtacgcttcgaactcagcacgctcgtcggtgctagcagcacgtccaacagggctaacattaaccattccattacggaactcaacgaaagtaccgcgcttgcgaggcaacttggtgttggcaataaatttaagaatgaaatccaccagtgtttggtacttgtcctccccaagccactggatgaagttgttggtagcaagcggcttgccgaggcggaatgcggtcaggccgttttcggagaagcagaaatcgaacatggtggtgacatccatggtggctgatccaagttgttcttgctgcttcacaaggttcgagccgccaacctacatcatgttaggaacggggtgggggtattgattgggaggagacgaacgtatccaatggcgcatttgtggcgcaaccgagagagcaactcgagcatctctggcgaggcatgctgtaatagaattcgttagtataattgaacaacaaggagtctcagtgcaacgtacccgtcttgcgggggtgagagtctcatcaacatcgaacagaacaatcgtgttcttcatgggacggtcctccaacgaggggtaaacactggtagcttcagtcattttgaaggatttattcaattgagtctgcaaagaccaaaattgcgggttactcgggggtaaatatagagagaggggtccattttggccgcaagcggtgagtgaaggcggaagcttagttgggtccagaagcggaaggccacctggtctgtttcactgttttggagaaaccttggtcgattagagcaagtgactcagtcagatcattgatctaaatcatttccgtcctggagtacacgatgttgtacaggattgacagtgcgacctaaacccgtggactcttttaagcgcctgactgttatcgataagaaacggaggggtcaattatcagatctgaaggagtttggaaccttggaaacatccatgaatgtgcatttgagaatctctaactactggttacatacctgaggtatatatttcctactgtacagtacaagtgatatatagccaaatagacatacagagtcggaatgtccaacccaacccaatccccacagagacctgtaagagcccagctcccaaatccagatcccgaacacgcagaatgaagtatacatacttagcgtcccatagtggactggaagaccttagccgctagctcacccaggagccgcgtccgatcagtgttcggcaggtccaaaaaagcctcgtagacacttttgcccttagcatcgcggaccgcgccgagacgattacccgccacagcgccagccaacgcaccaggaaagttgccaacaatgaagcccatagcaccaccgctaacaccgccaaccagtgcccagaatcgcccggttgagccagttcggctgccgtctccctcctcggcgagaccctcctcgcgtagcatctcctcgaatacggagccaaactgactgttgtctcgttcatcacggtttccaccgaatccaaaatcggaccaggagaaaccaccggtgggtgggacatccgcttcctcctccgctgcccgggtagcgtcatattcccggcggcgtgtggggtctgatagggtgaagtaggcgtcgttgatttcttggaactttcgagtgcgttcgggtcgctctggcgagtcgacggggactcgatcggggtgggatttcagtgattccctgggattggttagaggggcatttcaaagctagttgtgatgcacttaccgcttatatgcacttcggatctgttgttgggtggcattctggacgatgcctaggattttgtctggtatgtgttagttgggtcttaattaggcacttggagatcttacaataatcgggagctggtcaagagttagtatatatttcggtaagagggagtgaattaacatacttgacatggtcacacctggttttgattttgattttcaacagggagaatatattgtgctaaactattgctagactcgaagatgaatttaagagactatcacatgcagtgacgtggttgtcgcctaaccccgtcaggtacgtaccgtggttcaactgtttgttctatttgttttaaactacatcgatctatagactgtactccgtagtgctctattcatgttcaaacataatattgagatgattatatggcgaaatcttactgaaagtggatgtcttgactatctggggtactttatctcctgcagaatgaggtttaagactaagttcagccgaccataccccagccgcctttgttccgccaggggtggttgatcagactaatatgagtatcccctttgattcgcttgaaattagcatctagcattgtccacacccctcttacaatcccatttctgccagctgtcaaaaggacttacctgcatagaaaatccacaaagcggctgcacacattggcctagacctcagattgcgcatatccgcagcagctagtggctgacttgcatctgtctcttttcagtcttccaattgccgcacaaaagatttcagaggagattatcaggggtgtatcgttacccagcagcatctcaaacccgccttcctgtgtaccaacccaccgcaatccctctcctaacacaacaacccgttccccaaaccagacaccttatcgtctgcccgcagtacccacagtcgcacccgtaaccgtccccagctccaacatcagcatcagcatcccacatcaacacaatgggctggttcgacggtaaaaccagcgcagcttcgtcaacagggtacgcgcgacgccggtcatcaccgacacccagcacgcgcagcagacgcagcaaatccgcctactcctcgacgcagcatgcgcgctcggcgccgtccttcttcgggctaggcggcagccgaacaggcggccgatcgagtccatctgtgctctcgtcgttctcgtcttcgtcttcgcgccgggcccggccccgcgagggattcgtgcagcgcatgctccgcgacatcaagcgtttgttccgcgatatctatcgctgggcccgtcgcaaccctatgaaggtctttctgatggttattgtgccgcttttgacgagtggggttctgccgaaactgcttgctatgattggcattcgcttgccgcatgctgtaatgagtgcccttggtggcgcgccgaagcctcgtgagggtatgggtggtggtgagaggggtgtgtcggagcatattagcagtctcgtgagcattgccaagatgtttgcgtaggcgactgctctgctctgctctgctctgctctgctctgctctgctctctaggcctgggtaggctgttctgtttgcgcccgaggttcttttttttttctccacgatttgcaatgctctgctgaaattcagcacatgacgatcacgattatacacctactgtcctttgcgacttttctcgctcttatgctcctactcttttttttccccgttgggctttgccactttgcgatgttgtcatgaactgggaggcccgtctgaattcggtagaattgatttcttaggaaaagttgttgttttgtatgggcaatgaaaccttgaaagttcgaaaccagtctagagatacatgaagtctcctatttatactaaaccagtcaggtgttggtgcccaagcaggtggatatggcagcatcagacaggtacaccgcactgttgccagtgcactggccctacgacagacccgcctataaacctgccaaacataggtagatcttcctggcagaccgatatttggggtgtactagtatctgaagtatcaaatggatctacagggacgcagcacatattgtaccatggtaaacaatagccagtggctgcattattcggccctgaagtttgagatgggaaaaaaaattatgtgtacattttgtctacttcggtactgccaacatccgagcagagattctataaagcagcctcggggaattttgtgatctgcccggcaagaaagtggcgacaacgcccggtgcagcaatacagctgccccggtctatcatcgctgggagcgcttgccacgtttccgagagcgggagtttgaggtggcagtggtctcggcttcctcaaccaagggctcctcagcctcagaatccacttcctcctcaggagcagtccccaacacccgaccgacagtcttgttgaagcaccagattggaagcgtgcacaccatggtctcacggagagtagggcgttcaatctgatcaatgtcaagcaggaactcctggcgctcgccagcctcgttttgctcttccaagaacacattgccaatagaatcgacaatcagcgtctttccattctcagcaacaacgcgcttccgctcgccagtgctggcagtctgctcggcagtggaggcatcaggggcacgagcgctcacacggactcctcccttcttatccttcttgttctccttgtccatcatgcgcttctgacgacggttgacagccacggcaccgacgtcaccggattcgggggcaggagggggaggcgctgcggcgaccgactcgatcccagggataccacgaacgcctaattcatcaccccaggcggctcggcgggcctggcgaatgtagcgatcgacaaactcgcgctgccgcttccagctgaggatcaatgcggcgtagtgagcaccaccaccgaagactaggaacagacccaccagcacagagcccagaccaggacggaagcgcgagtagtagtatccggtacccttccacagggggaagccattcttgaggaagtggtcataacgctgacggttggggccgcgcaggacgttggcgacgaggttcagacgagcggagcgggcatcggcgttcttgactgcagcgtcaatctcgcgctgggtaggacccttgttgacattgacgccctggttggacttggccttgttcttgtccttggcgtagttggcaatgaaagcgcgcttgaccttgtccgggtggatggttctagacttcttgcggtaggccttggtgatttggtcttgattggcattgggacggatctcgaggaggtctgcagtgcgggtactgagttagatacgtatgccttaaaggagtcgaaaatggaaaagaaagaacagaaagaacagaacgcaatgctagagcgacgacacataccgtaaaaagtcacattggcaccttcgttggtggccacatcattttgtagaccaaagatctcatagtctgttccaggtcagtagggagggttggtccggggtaaacaatacccaccttctttggaccaagcagcgacgaggccgaagaagacgaagagcgagagaaaggcaaatggcttcatgattgacagcggtcaatgccgcagaagcagaagtctagaaataaacgaataagctgagtgttagtggaggacatgtaggaaaaaaagcggtcgggcgtttatccaccgaaccccaacgtggccccaatggcgatgtttctgcttggacgagtccagttgggctcatgaatgattgcatctgagctcactttgtacggaatacggagatggtatatatagagggatagagggatctagattctacgtagtctcattcttctccagaagacatcctaggaataacctcagggacccaatcctattattagtagggagtccctaactagctattccatctgactcgatgactcctggcctaaaactaaaacacgaaaggggaaaaggccaagaagggaataagtgattgccttgtctccgtgttgtttccggcttctctctttcctctctccactatacccatcacttttgttacctgtcccatttcccaggctttcttattctgctcttcttcccttcttcccttctcaaccccttcttcattcaaaatggtctctatcccaattgatgcgatcacctcgcgttttggcgatcgtctcaacaactttcgcagcacctctttaaccacccgtttcgccaacctgcgcccgatctccgagttcctcgacgtcaagcgcctatccaagcctgccaacttcggtgaagcgcagagtcgcgtcaattacaatctgtcctacttctccagcaattatgccgtcgtgtttgtgatgctcagcatctacagcttgctgaccaacctggtgctgctgttcgacatgatcttcatcagctgtggtatctacggaatcaacatgctgcagggtcgggatctggatctcggcttctctcgcttcaccacttcgcagctctacaccggactactcatcatcggtgtccctatcggcatctgggcctcccccttcacaacggccctgtggttgattggcgcgaccggcgtgaccgttttcggccacgccgcatttttggataagcccatcgagaatgctttttccgaggaggcggtctaggtggtcggccgcgagctccttttgatatgccctcatggggaagaccaccgggggcacgaacggggagaaatactaggggacgcgcggcgtgggaggagactcggctggaggaggtggatagtgaggaggatgcatacgggcgggagttggtgcggagcggtcgctacagggagtatggaggacgagggctgcggaggcgacctgtggattacgaggatctgacggatgaatctgaagttgatgggggagaattcgatctatacgaccatgaagatagcacagtggcctatgcgattcagttggccatgcgggacaaggaagatcaattggtggacacggcgctcgagcgaattcgtcgcgcccaagttctggggaagaaaaatgtgcggctgtcgaaacccgagctggatgccctggagcgcaagcgccagcaagcggacggtttaagcggaagccgacgcccatccaccagttctgtcaaagtgacgtcgcgcccatcgtcccgacggagtgcagttgttgcgccagaccagatgtccggcgcgtatcccacctttgctgatgcacacagtatctgggctcgtgggacgggcgcgaatagccgaccgtccagctcatcttccgctccccgtcccgggactccaacgactcaatctcttcgtccacagcagtccagttcacctcttcgaccgacctacccgccatacacccccgagcgatttgcccctagtggccgaccacagtcgatgcaacaaccgcctgtgttccaacggccactgccagacgatcctcaatgggccccgccttactacaatacaatgcagatgagctcatacggcgaacctgcggcatacccaccgcaggctgccaccgccggacagcgaatgagttacccttccggctctgcatacccatcttatcaatctcaatccccgggcaaacgctcactgcaaggcacaccacaggctcggaccgacccagctccagcaccagctccagctccatccaaattggggtcagaggagtccagtgaagaatcggagagcagctcagaggatgaagtgcagatcgtcaaggtggccaaggtggcggaacgcaaggccccgcctgctgcagttgcgcagaggcggccagttactggaaccactcgtaagtggaccagtcgatgaagtggctcagcgttgtcctgatatcctctaaatttcactttctgtctgggtttttttttctttagtgtttgttttttctcgattccatcattgcggtctttccgtaccgcgacggcgttttaaatagaccggtaggctacaatattatttcctggctcatttgatgtccacgtacgtatcttgtagggtttaacatgactagaccgatgcagcatttctgaaatgtctcaacatgctattctcggagtagccccaaaggctctagtacctggtattgccaagtattcagccacccgggctacccgtagatcgtgtgccaaccttggatcattcatatcactcccaaaggtcttcaaaggtacgatgtaaactcttatataactagggcaagtacaatataaccattgcagtaaatcttggggcagatctttcgaaatgaggctgtgggggcgcacaaatttcataccttggcagcccacgatatgacgtcgccttcacaatctccaggttttaggggagcctaaagaaaaataaataacagcttgaaccatttctgtctttcgcaactgcttctcctttcaggatatctaggaatccactataccacaagaaatagacattccccttgcgcatcatcgttgacccggttccaattcgatatccctttgtcatctaagcgccactgtcgccccttaagacatcatttgaaacctggaatgctgtattcctatgctacattgtacataaatacagggatatagggtgagtcgcacgatcggggaacatacttggaatccataccttctttccatcctacagggaaccactgacaccgattggagaagctgcgactgacaggatactataggctctcgttcgcctcgtcactctttcaatcctcaaacccccactctctttgaattggtcatttagcgggcatacaaagatcttacacaccttcattgttgcatcaaactcagtctcgaagaacaaatcaccactcgaaagtcgacagtcgaaagtcgcaaacatgtggattatatcattttggatgtttccattggtgtcagcctgcatgtgggttggtaaggcatccctgcatggaaatggaacaggatatcttgttctgggctgcagctaacacggtcctagcaatgttgatcgccatgctggtcacctgggtcagagacggcagaccgcactatgccagtatggaagcgggacagactattgcgtatgtttcctctccgctattagcccatgcatgcgctaataggttttcctacaggtacatttcagatgttggagcacaaggcttgaaaccgctgttcatcgcaggcagcgtggttaccgtcgtgtttctcgatttggcattcctctccgagcggtggcttcgacactccaaccagttggcctcgaacaagggcaggttggacaaggcatgcgctattgcatcaatctttttcgcgatcgccggtgctgctggtctgatcctgctctctatctttgataccctccgccacccgaaacagcacgacggtttcatcgccctgttcatgtgagtcttgtgtactcgactatgtatagtcaattgtgaactaatcaatgaatttctctccagtgctggatacgtgattagtgccatcttggtttgcatcgagtaccttcgcattggaatcttctaccgtcgcgagcaccgtattctgctagtcagtttctttatcaagcttgtcttcgtcatcttcgagctctccctcgccatcgccttcggtgtctgcatcggcagcaaaaagtcgtccaagcaaaaccccggcgcggttatcgagtggaccattgctttcgtcttcactggctacgttatctccttcgttgtcgatctattgccttcagtgcgcacacgcaaccacgtgcctcagggtgagaagtacctgatgaaccagggcggattcggcggaacccgcgaagaggctgtctctatcgaagaacccctgactcatgactcgatgggcccaagcaccggcttttaccgcggtcagcgggtctaactaattctctttgcttcttatattcctgtatttacttatacgacctgcacgatgtcatctgatactctgctcttgttaatgtttgtttgatacctgtcatggatactctttatatatggtgttttcaggttgggcgccgttgtccttagaatacatatttagtctttagcaattcaataactcaattttagatgcttcctatacttctagatacgaaacgaaaatatccaatcctccaccatttatcattcgcttccaaatgcccatacatataacaagaaatgctagacccatcccaatgccaggtcattatcgtatctacatatcccatatgaaatacagaaatccatatccatccatatacccaaactccaaaccccaaaaaacccaaaagagagaaaaaaaaactcaaaccaaaaacttcgccctaattctctcctgcatctcaaacccaaccccaacactctccaagtaccctttaacacccccatacctagtctcaaggtactcagtcgtatcacgcacaaagccaggcggacaacgcgtatagtcctccccaagccccagcgccctaatctcctccatcctttcctcaaactccgacacaagctccatctccgagcgactgtagtcttcaacaatcgcctccaccggcaccacattcccaacaagcagcaacacaagcaacacaaccaggcccgtccggtcctttccctgcgtgcagtgcacgatcgttgggtaggtctcctcgcaagccaggagctggaacacggcgcggatctcgctcatgctggaatcaagcgtgtcttgggctagaccggttagtccgcgcggttgcattactgtcccgcatactagacggactgcttcgctgcggtagcctgttgttatcaggccgattgttttgcttttttgggtattagttgtttgtttgtatataggatataggtaatgcaatgtatgtaaagctgcaggtgaagaatggagaagggggagggggaaattcttacagatatgttggccagtctagtttcgatattaaggcgcgttcgaagcctttgccggttaggcttattagagctcgttttgagccggggatttcgagcaggtgctcggctgggtttgaggggagtgagcctgtcggtgatggtgatttctgtgatggatttgctttggcattttcgcttcgccgtttccgcgtgcccattcggtgttcggttctgtgttggggattagtttctgtttctcgcgtgcttgattctgctgttttctgtttcgacatactgggaacggagatcgatgacggtgtgaatgtgtagttcttctgctagacggcgtttatctcgttctgaggcatcgtcgagctgcaaattgcaagttagttttttttttttttttccttccttctcgtgtttattctgacaacgcatcgatcgtatgagcggggttagaattaccctcgcactgcggaaaaacacgccttctttcaagatcctacgtgaaatcgttagcagctgtgtctagagagacttgaatatatgtatctcgggactccagacgcgtctgaactcactctttgttacagaattgattaaccgaccggccgacatcgcggaaattgatgatgttgtcgaaaggccgatccggcgagtctagatccacgctgttatggcgcgacatggtgaattagggattagggaatataaaggaaatatagacaggaatcttgttagaaatgagaaggaggagcgtgtttaaacgtgtggagaagtacaaatggcggtggacgcggacgtcgacgttgggcagacatcgcgtttttggccgatagtcgcctggacaatgaacgtttttggcttttaggagttatattcattcaattgtcattggttatgaggatttattggtgactttggtgactttgtatgtgtgggtggtttgaaggggtgactgtacgagtgttatattccaaggtccttttgtatatttttaaaacctcaatgttgacagtctagcggtctgttacttgatcttctaatcctcaaagcaaacaaaaaacaaggaagtagcaatatacagtgctgaaacaggtaccggagctaaacaaagaacttagatctaggccccgggaaaatccagaacaaggaaggatctcgattcaatgtgtcatacaacaccacagtcaacacctttatcaactacacatattgctcccggttgttcttccattgtggctgcaggtatgaccaatcgtgattgaagttgaatcctgtacgataagccccatatgcaaccagatccacctgactcagtctcgcccctcggtccgtcagcgcccacagactcatcgccaacgtgttctccccacggttattgatcacgccaggtggaaaagggaacctagtctggggaccgatgtgtggcaggtaatgaccgaactggtacccattcatgaagatctggactactgcggggaaatcagcagatgcatcgagctgcagaccaatcggaacgtccaggtcggagtccaggtcgagctggaacgtcgtcgtgtagaaccggcctgctgcaccagatatgccgtccagcggactgtgcgaggttgcggtcttgggcgctttgtatcctgggagatgccaaccgagacgctctccatagagacccccttcgttcatgggtccccggacgggatcgatgttggcttcgcctcctgcattgccttggatacgccaggaagtgaattcgccaccaagaagcgtcgcgcctagtataccacgcgggttttgtgctccgtttggcgacacgttcgcctcgtcgtggcctgtgtaatccatgataacggtcagaacattgtctgtcttgcgcaaggtagcgctgttgaatagtagctcggctgatgtcgcggctagggtcggatcaccaatggctccgccaacgtagactccgtttagccaggcggcccaaccagcggctgcgccgttctggacagtgagatttgcgcctgtcgcggtcatgccatcgaaccgtccgcgatatattctcgttccggcatggtagccgtagtcgccagagtaaagcacgggaagtgtgagtggtgccacagagttgactgatctcgttttgttgcagatggtccagcgagaatcatcgtagtctgccttaatctccggaagggtatcttgcgctttccatgatttcagagtcggcagcgatactttggcttgggctcccggggctgatccgattaagctgccgtatggtgtcttcttggttgagatctctttgccattccacttgattttggtcacctttgagttgcccgtgtagaccctaacagcatatattagcgagtaaattatttgagagcttcgcgcttactcaatagatgttgtgtttgcgttgtcaccaacaagactgacagtatccccactgacagttgctgtgcgaacgagatatggcccaagggcaatgatctgctcactgggaaccacattcggattggaagtagtcggtactgcaaagaagttccacgctgtctccttatcaagaaggtagaccagtacgccgtgcgagaatttcagcactgtcgtgccatccccttgagtgtatgtgtatttcgtgccatgattcgatgcaccagagttgactttcgaattcccgtaagtttggaaagtcagatgggtcggtgcgtctttgaatacaaactctcctttttgtccgatattcagatagaagacaataacatctatgtcgagggtggcgtaggtcaagacctcggcggatgaatagagcaagctcgagccctggccaatccggtagtcagtgacgataattttgctctgacggccggccaactcaatattagggattgtcagggcccctgtcgtgtagaattcaagttagcgcaattattcctctcaaacactggagtacgtaccagccgatgtattgacattaagtgaagtagtggtcacagcacgagatgagctggtagagtgcgcgagaacatagaaaccggcttgggtttctgggtttcgcaaggcccacgtatatatacccgcatcactggtgtaccctgttccattcccttccatttgcatttgtaaaagaccagatgacacgcgcgtaaacagaccgatcaacttggtctgcttgagtttgtcccgaatctcacgcgtctctcgcatgggcgcagagtagtcatatgaagtatagacaaccggagcagcactgtggccccaagaagttgcccccatcaccatatatatattctgcaatgtgactctggagccgatattattcttatagtagacatcggcgaattcaggcgaaagctcggtagaacattgatcgtagaacgtccctccccagggggagaaccaaccgccctcaaactccggcagatactcgggctgagaactcgagtaattctggaaccattggtaataagtgcggacgagattgaacccagtatctggattggtacaggacagaccaccaggataggagtccaaaccatagacattgacggcaccacccacatcctggtagtccgtcgaccagctcatagagcgcattcccttctcattatgcgtgctcgggacaacgataccagcctcattgaaggcggctttaacttgttccatgtacttgacaacagtgttattggcactgtgtgttgtctcctgcaactcattctcgtgctgattgagaatgaccggaccaccgcttgtgatttggtttgcggcgatgatctttccgatcttctggatccacggataccatcggtcatagtaggtgcttgcgctcgtgcgcgtgctgcccatttgcccattggatgcccacagtgcgaaaccaccagcagaggtctcagcattgcagtaaggtcccgcgcgcgcaatcacatacagacctgcctgcttggcataatcaaagacgcgctggacgtcgtgggcaccgttctcgaagtcgaaagtatcttcggaagcggagtggaaattccagaagaagtagactagtctcaatgagtaccagtgcagcctgggtgttgtcaagccactcactagaaatcgcattgaatccatttgcgcgtagcttctgaaatacgtcgagccaaagctccggcacggggagtcgctggtagtggaattcaccagagaacacatataccctctctcctttaactgagaggctgtattgatcccatgtcacatcagtagtcttgccattatctgtcgcagagacgaaatggctggatatgagtccaaggagtatagggagaatcgtgagaagacgcattattgggggctgcacaggtactctccatcttggaatatgacttgttataatgtgtgtatgcttcggtcctcgctacagaaataccccgtactctgctgggattggtggatgttttgttttggagatcgaatgtcggattaggcaattttccatgaagatgcgggggaatgatcggcttttgactagggacaggtggttctgaatgaattttggacattgaatacagatatacaaatatgcgtctgtacttgatttcctctgccacttcttggctttccctttccgtcttagtgctcagtccttgccgctttttgctcactgaggacaactgagcacgtcgctgagtattacctaagctcacggacttgctcaataaaatgcaccacgctagcatccaaatgcagttattcaccagaactcaagcccactcttgaccgttgttccctcaacgaaaagatgctatgccactattcaactcgccaagtctcgtattccacaataccgtctctacatagttgcgggaaatatccaaccctcagggactgaacgcacttttgggcggttatgttacgatcaaggcttggtagttcttttcttatgtcgttggctcgttggctccttccttctctatagggatcgttccttcctaagctgtaggagagtatactagattttgcctggcaaggagaagggtacaaaactcacaatggccctgattcctttcctttcccccccatgttcgatgttctagttagaatgtactctttttcataaagcatcggcgcgtaatattatatattacacatgcggtttagaccgacactttaggatagaggatatttgagcttatgagatgatattatcggctgtagttggaccccagaagagatatcgattgagttgactcctatggcccctgacactactgtttactcatagctgagacagatctcagctgaccgagagcttccccattgaatgcctcacttgtcaccgtccagtgccgagaaatcagtctcttggcaatattcacggaacgaggtcattttcagaccaagctatagaaaggtcagtcatgtcccagagtggcaacgagatcgaataggataacataccttctctggtcgtacaacagcaggatcgataccttcgtacccgaactcatgtgcaaataatacattgtgagcaaattcgtgaccaagacctccgggaagcaactcgcagaatttatcgtaggaaagctcgtcatagccaccatacttgaaaccttgggtttcgcaaaagatgcggaggtaatctgaccacgatacatattcaccaacagcaaataaattgacattgggctcggactctgcaactgccctgacgcaagggccgaaatccttgcggacatgcccgaacggaatgcccttgtcacctgggccaattcctgtcattcgccaggtgccatcaactacctatgcaacgagtcaataccttcaaaatacgcccgggaattacgaaaaaaaaacaaaagtcctggcggggcgatttcatgattcataccttcttcggggttgtaggaagtccccactcccaagggagctggaaatatatgggcgcctgaacctgcgagaattttccagccagggccgggatgctctgtgcgtagatggcagcgtctgctttagaatccatgtgataaagttcggtgaacttgctgttactggaattcttcgcatgggccattgagctgaagatgtatcgggataggccaggaacagtggccgcagcatcggcaatattcttgccctgttggagctcgacatcgtggcaatattccacaagtgattggccgggcttcttcttctggtgactttctggatctttgaagattgtccagaagtcggtgacaccaaaaataatgtcggctcccacaaaggcctcgctcaaggatgccacatcatcaaggtcacctttgatcatttcaacacctttcatctcccatttctttgcagtatcagatgccggattgcgcgtcacaccgcgaatcttccagcccggattcacaaggtaagcgtcggcgacggagcttcccttcagctttggtgttagtaacctcaggcaatatccaaagaaattgtacagggagcgattctaacttacttgcacacccgtaataccgaggatcacaataagtcgcgacattgtggaagatgttcggtaataataagataatgaccactcaaccgaaaaagtgattgagtgtcttgggctccaataatcgaatcttcgatatcctctcaaccctggaacctggcaagacctcagaatttatatcttggacttccaaaaaaaggcatcatgagacatgaccaagctgtacttcctgattgataatctgcatttccgttgccggtcgcttggtaatataggaatgacgcaagcaattatcccaggaatctcgtgaatgtcgatactgcagggcagaatcatctggtttgcgatcagagaagccagagagacccacttaattgaatttgaatttgactttcgccgttgaacttaaagtcgcgctaggctgtggggtaacagggaccgacatccctatccggttaggctggactgctcactgctttcccaatcgggaacatagtcatatattgcttgtatccctatcaacgagtgccacagcgttctctttgtctagtcagatgtaagagtctggcccattccacggatttgggcaatatcggacttcggggcctgaattaataatatcgaattcgatgagtgctgtatgtctgcatcctacttaaagcaaagctattcgctacatcaccgtaacatctttcctcacgcttccacatttcactgacattgatttcattttacatcttccctccaaagctctgacttgcgacatggccctcaacaaggaactgtcctcaacctataaccagtttcttgaaactgcgccgaaggaagtgtcttccatcatcacggacgcggtcagagactttaaaaacagttacgatcctgctagagcgatccagccgggggacgcctttccacaatttcacctgagcgatgcgaccggtaacgaagtgtcgttgaatgatctccttgttgaaggacccatcctgatatctttttatcggggtgaatggtgtcccttctgcaacctcgagctgcgtgcgcttcagagccatatggacgagtttcaccagaaaggcgtgacattggtagctgtgtctccggagctacctgatcaatctctgaccacatctgagaaactgttgttgaagtttccagtgctttcggatgttggtaatcagctggcgaagaaacttggcctgttgttccctcagcccgagtctatgcggaccgttttcgacaaatttggcgtggattggaaccagcggtacggcaatgacaacctggagcttccggttccggcaactttcctggttgataagaagggaattgtgcgcaattcctttgtgaatcctcagtatcgtcaccgattggagcccgagattgctattgagtggattgaccggctttgatgttggcttttgctgcgcgctatcttcacactcgctttgaggtctgctgcggctggaatatacgcgcgggggagggggctggttgattgggtttcatatcgttagtttggcttcgaaggatctcgacaccaaatcccaagtaactcggcgagtgttgagtcatgacgcttttctccatcccgaagaaacctgtgccgtggctcgtggtcgatcttttctagtctcgcttcctctactctagaataaacacattcgttgacttgcacttttagtatgctgctcctgtaactctgcttgaaccataaatctccgtgctaaatgtgcttttgacgtattatttaatccggtgctctatattttgaattcttggcatctcgtatcagtgaatacgaaactagtgatgagcaggtcaccaattctgctgagatcgcgcatggattacaaagcagcccacagtactttgctgattaatgccctggtcgtcgtggaacatcaggtgagccacacgacgttgagaagacattaggacaacctaattgatcctaacactgaagaaaacaatggatagtgtagactggaagtctaggggtgctgagccaccgacacgggatgcgcagatcctccctgcccgtccctcacacggatcacgaatgttggcaaggaagcttacgagtgtccaaccgtcggcaactcaagacctcaggttcataaacctatctcacccagatgacttacaccgacaaaaagaggtaagaacggagatccgtcgccatgtcatgaaggatataggccaacgacggagacgcccacaacccaatgcaacctcttcgcaagccacccgaacattttcttcggagtcaaatggttacaaaatctctcagcttcgtggcgcaatcataaacagcgtttcacccagccaaaacttagctatgctcgctcacttccctgtggaggctgatatgcgcgctctcgaactgatgcactctggtaagagttccaagctttccgttggcctctagctcctctcatctgttaatgcttgctctatattagtcgtcacgggcccttatcagccattcaggggtgtttggattgaggtagccctatgtgaccccggggcattccatgtgactctcggcaatgctgctgattttctcaataagattaatggcaatcaaagtgtgaaaagtccggaggctttgagtcactttgaaatttcaacaaggaaactaagacagcgtcttaataacttcacggagagtattagtgaaggggctattgccaatatattggcccatgtctgtctcactgtatgtgctatattcctgaatatgagctcttgaataacctcttttccatagatgaggcactgtgattgggatagctggagtattcacatggatggtttgagtctcatagcgaaactacgtggcgggtttgccgacctcggacatcgcatgtcacttctcatactgctgtgagtactccgtacctctttcattttctagacaaaacttctgactgttccttgcaaaggtacgatctagctggtgccatggtctttgattcctatccgcgattcggtctcccagcagagtttgttggcatatccaatatatcttcgagagggcttgcccctaggctacaagctttacttgtccaacccatatcgcccgcatttttcccagcgggccaagcattaacaatggtttcctcaattgcggatgtgataaataccactagtcactccgcatcattctggaaaagggatatcgatgcaatccgcctgatcggtccctgtattcactttttgctctcaatgccgagatttcccagcaatttcgaggccatggctgatcccgaagaccttatcgcgagagaattggttcgacttacatgtcttatgcttatgtcgaaattgaagggacaattcgcattccccccgagtgagctagtttcactacctgctaggcttgccgaattcgtgcctccgaatgtaaagaggctcggaaaaaagtactttgagctgaaaatttgggcccttgtcaccattgctttattgcgatattgtgacggaagagaggtatacatacaggagatgaaaagagaaatgtctgcaatggaaaaagcgacaccttacgaaattactgggattgccagagatatcgtctggatcgacatcttgatgtcaccattttcagaggagctcgcagcggatatgaaactacacgtcactcctcaaggaacctgttgaggtcattgacgctaaatctaataagaaatatcaacccacgggtttcagcagaatgaaaatgtaaatttgcgtgcatagctctatctgaaaccaagacaagtcgtggatgtcacaactattgcgggatggagtagctgtgtcagtttctcaggatatcagagtaattgaaaatagggagtacaccccaagacgatcattgtgagatctcatttgtattggttatttggatctgtatttacataggctggcgggatgaaggaaatgggctgatttccgcactcttttcagatcagcatctgttttccatttcggcaatgttgttacgtgagaaaccaggcatctaccggcacttgattaatgaaaccttgaacgacggtgatatttcatgcacagaacttggaaaactaatcaccaggccccaacctcttccattcataaccttctcgcataccggtttacttctcaaatatggctaaaccttgtgaccgctgaccagcgcccaacttgtccagctcaaaatgctggatctgccggcccttgaaagagtcaacaacggttaaagcagcgactgtggtgccatttcctggggaaagtgcgtatacataatggccgatggctctgacatcggtgagaccggggtcgccatttctcaggtctaggatcgttaagatcttcgagttatcattgcggacttcaactagtctgttagatgctgcgtcggttaaaaatacactctctcgcaacggagagtaggtagcccaacacgtggctttctggccttcgatggtgatcttgtgcttgagagagacttcatcggtgacgtcatcgaggataagaacagtggctccgaaagatgcgtccgtgatgaataggtcagatgtgccggggatttcaacgccaccaaatagcactgccgtactgggcggagagcttcgaatatcatgactctcgaagaccgacgaacacgaatctttgaatggcaggacagatacaaagcctgctttgccagcagatgggtcccccttcaccgtggtgattagacgtgtatcgtttgcggcaaagaagacctgtgcgactgtatttgttggcccaactggaggtgtggtttggtggagttcgaaatcaactacttgatccatctgctgtaggccctcttcagcgcaggaaacgccggatttggccccagtgtatcccacgcaaggagcaccactcccaggtgaattggaatagaaaaatgcatcctggtataacaagtagaccactagcagtgaagaggggaaagaaagatgaagttgagctgagatgttttcttgagaattaccactgctcccaaggcctttaagtatcattttcttgaaatatcaataactaaacccgcgtgaaaagatgttatgaatctaccgattcaggaaaccatgtttaagtcaacaatgctacgctagcggttccacacgccgtcgttttgtatttcaaatcattcgagatagtctggaaaagtaagaatgtttgaatcgtcactctatgcccgcccgtgtgtgggagtctcgtacggagtaatcgaaacattttagagatcagtagttcgatatagacttcggcttagccccgaatagacgaaagtgattcagtcaacaatccgcttacatttatgggtctcacggaaaagccgatcttccgctgataatcttgaagtccaagtttggagcttcattgtaatttctaatccaaggtcatctatctcctctgcaccgatctgacggacttgacgtgataccaagctccacagacccaacatgaaaaaagcatttactttccttcctggatagagctgttgttgaaatccggtgccaatgtgaatgcaagaacagtcagacatagcacgtctctgcatttggcagtcgaccaagacgcagcgaacgaagtgactggattactttttgggtacagggtagattggaacagttcaaatgaaaaggacggacttgatacaccgttgaaaacaatggtaagtcgccttggtgacatgtcgaccggtttgtatatttcagagacatcgttaattagatcgattatataccaagcatccaaaaatcattagcaaagtaaaacaatccgaccctaatatcctccagaagcaccgatttcaaattccacaacaccaataatcatcccaagatccaaaaataataaaatcgtacatcaagtcaaacgtttcaaatagaaatacacatcaacattcaatatgaatatcacagattctcggagaatctcgattctcttctcccgttcagtgtgtcgccaatactaggtggcacaggaagactctgcccgatagtactatcctgcagactctggagatcaccgttcccgacacccttagacgcagattgaactcccgaatcacgacgggagtcaccctcgttcgacccatcggggctaccggagacggccttgcgtaatgtcctgctcagacggttcctcttcctgccattgcgattttgcttggtaaactttggcaaaggatcagcactatggatcttggccacgtcaatgtcgttgctgtagtagctcgaagatctgttgtgcgtcgggacaggttcaatcacaccaggaggatgtgaggcaagcgctacgctgcggggctcgtcgcggccggtcagagtggcgccgccttgaaaggcaggttcgctgtccgtgttaatgtccggacctggctgatgagggtagatggggactgggccactggagcggcgaacgagacggtcgcggaaccagttcttgagcttcgtgtcggcgcgcgggcttgtaactggtggcgtgaagtagtgcaccatcgttgggcctgaggcggctgcatctcgctgctcaatctgggcgggctcggtctggcttcgtaacggccgccgcgggattgctgcgggcacgtcactctcgtcggtctttgaaggttcagtctctgagaccgaggagtcagctgcaagaacagttgtaggaccggctatttcagtctcaacagaagcttcgtcagggatgacgctcgaaacattgtcgtctgtcgcaacattgtcctgtgtctcaacattgcgttctgttgcaacattgccttctgtctcagtattgccttctgtctcagtattgccttctgtctcagtattgccttctgtctcagtattgccttctgtcccaacattgccccctgtctcagtagaagcgtgctcgggagtgatgtctgtcgcaacattgtcgtccactgctgtagccggagccggctctactacagcttcctgggtaacaggcgagacagcttcggcctcttcggtttcggatttctcaacccgagctcgtttgcccttcttcctccataagaagaatttgggaatcttactctcgaatttttcgtgcttgcttgcacctgatttattggtcagaacatatcaagaaaaaatgacagggtaactgacctttttcttgcttctccaactctttcacctcagcttcgcgttgacgctccaaatcagcacgtcgctgctcctcctcagcgtccaaacgggcttcgatatcatgggctctccgtaattcggcattctcggtaatctcatcgaaagcgggctgaaggcgagcccgagctacagcatcgacgtcggccatgtccatatacctttggccgccgatgttcactcgattgtcttgggtggtagcggcttcaaaatcctctgcctcctgtcgtgcgcgctcctgggcaacttcatcccaacccctctggacggaaggcggagcgcgaccggtgtccgcataaacctgcgcctccatgtcctggagggtttgctccacgttgcggcgagcagcctgcataagcaactcacgatccttgttcttctgcacatctacttggcccagcttggtccgcaggctagtcatctggttccggatttgccgcgactgctctacatcgagctgagaggcatccacatcgctagaagttctcttgcggcgggtggtcaagcgcgaccgttgcggttgcggtgcggtgccataatattgttggtattctgcatgctcatcctgcataagagcaagtttctcggaagctcgcttttgcgctgcttcttgtagtgcgatcgcccgccggatagcatctccatctgcggtggatacggtcttgcggtagcccaactgactttgtcctctttgggctgctaggatggcagcggatctgccgggttgtttcttggtactggtgactctgtacatgtcccttgccattgagatggcagcagcgcgttgcgagttcttgtagttttgttcctcaatgtcgctttgtattggtggcgatgaagtatatagcttcgggttagtgctagcggcatgctgtatcctgcttgcttctatggcatggtctaagtggttaagggggggctccacttccacacgagcattttgcgacgcgctagcagctgaacggctgtatggtatttctgaggcaacccctggatcactgggtgccgagtcggctctcttacgcgagagcgtgtaagcgcccgacgcagcctggagcgccttgtccttcgggttaccaccgacggctgtgtagtggaaacgatcggtcgctgagctgtcacgcctatgggaagtggacgtaggggcctggctcacggaagccctttgttcacgaacagcgagcattgcagctcccagtccctctgcactgtgctgagaggttggttggggttgctggggcggaacatagtccttcacgcacaatgcggctttctcggcggcaggctgtcttgctgggggccgccatacttcgacaggtttgcgattcgcatgtgcgagagcggaagcagcggaggcgtggctgaggtttggagtaccaccgaccgcgcgtgggtctaccgcaaataacattgtcagcttgtgtgtatttcacttatcgagggaccatactcactgaagttctgggtattaatcggggtcggggcgcgaagagatgccctacgttcagggtgtgtcacatataaggcagcagtcgcggctaatctcacgtgaggttagcgatccgacggatatcctgggatgcacgatcatcttaccatcatctgccagccgggactggcgagtcacttgcacagttgccataattcaggaactgcaaattccaatataaccaaagtcatgaaaaagaaaaagaggacagcagagaacaaaactataaggcgaggtggatatggaatggaagtccggaaagcttctttgatccccgtgacgtcgattgggaagccattgcatcatcgctttggagattttgggatttttttatggagacgatcgatctgtcccggagctacgctactccaagctccataggggctagtgaaagatctaagtggagtgaagattccgcattcgaacaagcggaggcccgtttttcggtggtgacgcgaggactcggagttctgatttacttctgaatgaaccctgatctacgtcgatctacgtcgatccttcatatttcattcggatactacatgtacctatgtacctatatgtaggtacgaagtacggtgatgtacatcgaagttagtcgtgagcaccttaataataaggcagggatcgccaaggatttcattatgaccgatgaacgagaatcaaaaggtcataaagtccccataaataatatccatgtagtattccgacgtattgtacgagtccaacatatcatgacccaaagtgtcatgcttccaatgttgcttccaatcaccgtcatctcgctcttatttggacacaagaacttcccatttgtctgcacattacaccacaccagccgtgtatcatttagctagtcgcgagtcgacatatatagacgcatccacaacagaaatcgaaaagcccgcaactgtgcgaatttatacaggcttgcgcacacttgcagaattctaactactaatttcatacccaactcgatggatcatctctcttatcgcaaaggtgttgtataaaattgcaggaatagtttcttcgggtactggaaatagattgatggacatttgcagaaatggttcactcagatactcgacataacttgatagttaacagttgatcagagaagaacaggtccctcgcctcgaccggtgggtttcaatatcatgccgaggccaattgcccagtcatcccttcctgtctcttgaatgagctcctccgccaagtctagtctccgcgtgtaaggggtcggctttccaaccaccttaagcatacgcccatacattcggaaaccctttgataatcccgtacataattccaatagccccgccgatacaagcatcagacaaaggagacacaggctacccattatggatgaatttcccgagatgacagcggacaaatataccatgagtgtcgagaaggtgatgagtagctcgtcaagcaaagttttgtctcggagccattgcccggaagtaacagccttcaagtcatcgactgtgccccgaagacgaatccatcgatcttgtgtgagtaaaatgagaagatcaccgttcaccccgggctctgtctcgcctttccagtcaatgtgactccgtatcttgatagaccaggtgttgcagattctagcagtcatccacatggcaagtgtcaccagggcccaccaatcttccaacaatgcaaggatgataatcacagcgactgtcaagatctgaccaattgcatagaggaagagtagagtcttaccagggctttcgatcaagcatctcaacttctcctttatggtagtcggcggcaagtccacgactaggttgagtagattacccgtttttccgacactttgcaaaaagtgcaccgtggcttcattctcaatccgaaagacgtatcctgacgtcaaagctcctgttgggggtaattctccgccactaagactaggggctgaggaatgtttgtgcatgccgggtgccagaaaaggatatccgcgagggatgaagtaccagtgatagcagtccatttggcgatactctgaagatccgccagagctactagaccagcggcgtcaagctggaatttgccagaaaggtcggatagggcttgttggaagttcattttgttaggatctgtggccgaagaaggaaaggtgggctgagaatgagagataaattcaaaaggtcgtagacaatcctatttatatgaagcgaactgagagtgactccgatgtcttcatatacacaaataggccgaattcccatactgaaagcagtttcctgtctacgccagcctcaccgtggttcgtccaataggaaggtgttctcaccctccaactttcgtgattgctatttttgctgcgatgtttcttttgtttcccaaaggccattctctttatgctgtttcgtgtatgttttgtcgcttatggactcacctaggacgcataagcggggctaatggtcaggaaaaatgctatactgtaccgtacctttagtattcattatatctttgatgccaattactagcccatgcagcggccctctctggtcttggggaatccaatctagctcacgagcttgactgagtacaaatgcgggatctgatgcaaactcagtagatattcttcgtttggatcacagacatgagcggggaaaagtttacctagaaatgcccatgctttgacaatgcagtcccgttcctcaatgcgtgctaagagagaatgggcgtattcctcgacagtgatcgtgttcttctggagtatatcccgcacttgagtggcggtcaagagatacggcttttccaccatggtcgatgatagttgggttccggacggtgagggccaatggcggttaaaatactggactcactcgagatagagaagtcgcacgactagataatgtgcatagcaaagaagacctcaagaagaaccgcatggtggggtaggtatctaaggaaaacatggattcttgaagtggatgtttcagcacgactttgtttagtctggagatattttgagaggcaccattgattggcgatagcatgctccagattcgaatatctaagttgcgatataagccacaatcgagttagagtcatcaaagacggaggacaacctcggaaagatcgtgtgtgacaaaggaagtgggggaaaacgagcgatgtcgtaccggtagctaatcaaaatacgacgtgaagccgagtcttggaaatgacggtggtggaagaaaggaaggggggaaatgggggcaaagaagaaagaaaagcgaaaatagaagtccagccacggaagaattctgtccctggctatgcatggtctttcttcgatgcaatattgctgccaatatgtaacatggaatgaccagatccatcgaagactttgatttcgatgttatttgtttggctggccaactcagcattgtcaccaatctgacccacgaaatcatccttcacttagacctctccgacatggatggtgcgtcgctggagttccatgcggagaatacgcttcagaacatcatcttcgccgtctataacctccctcaagagttgtaggctgccggaactcatagcctggatctccttcctacgcagctgtccctgttcattggctgtggaggggaaacaactccaccaagttattgaccaaatcggaaatgttctcgactaaattctcatagtttcctcgcttgtaaagagcccaagcaactcggtctctcttccgtggcttcaaacgcccatggataatatctggcatggtgaggtggagaccgttcagcgaatcgctcgctttcgcaagttcgatatctgtgtcgaggagcaacaatcactcatgtcatgtaaaatcatagatacccgccccttgaactgcccaaggattgcgacgttacgcattaccggagataaagcatgtcgaggatgtcatgacgggcaaagaaagaccggttccattttccaaagacatctataccgggaaacggttagtcgggtgcacaacacatcacccagtaaaacttacacatgggaatactcaacaggcagatgcccatttggatgctaccgatgacaatcatggtatgcttgatgcctccgtgggcaaaccatttgtaggcaaaaaaggtcaggacaaagctaaacatgtttttgaaaaccaacatgcaggtaaatgcctcaatggccatctcgcctagtaatgtcagcaatcatttccacgcaagacctaggagtccacatacgatgggcatcgacgatatagagtgaagcagcaacggctcccataaccatgccgacgatcaagaatgcaaagaagacgtctggcagcagccagccatagtgcatcacattattagcagtccacccgaacccatacagtccgataccacagaaaatgagctggggaatcaccaagaggatccggaactcaggctcgtatttaccgtggttgagccggatcatcagcttgttgatggaatcagaaagcagaccagacagaatgaggcctacaacagagccgataaaggcacccgtgtaaagatatccggttttgtcttccgcgaaccacattggaggtccgagaaacacaattgctagaaccacaccgacgaagaccgcccatccgatgacgacgccttggatcagacaagcctatactttaatcagcgtatgtgaaactaagcgaagtgggttacttacccagaagatgcccggatggaagaataacgggaatggacgaaggagcagcttgaaaaagctctcatctgtttttcgtccattgaacagcctgagcgattgggcgaaggaatctttctctgggactgttatcgcggcttccgtcttcgaacttccatttataccgttggaccttggtctaaactccttggtatcatcactggaagccccactgagtgaaacatgggattccatggactcgccgtgcccgccgcttcgcttgaagtcggtgttcaagtaatctgagcgtcggaaagcagtttcaggcacgaaaaagaacatcagtggtagtgaagaaccgaggaaaatcgccacaaagtagaaagaccactgccatcccatggacttggtgatcttgcctaccacaacgggtgtcagaaaggctgcaccaaagagtgcgacattggatacagccattcgctttcctcgttcctttattataccgattagtctcctcatgtgtcaaatctacaggaaaagtaggcccaactcacatgaacgaagtaaaggtctccaacacaggcatttaccaacgcctcaaacggcgccaatgcaacaccctggaatatccttgcccatatgagactattcttgttctttccgctaaccccagcccagatgcagctgacaatcatcaagacatgcccgatcaggaacagatgacgtttaccccagacccgagccgttggcacaatgagaattcccgccacgccgacaccgcataggtgatatccagtcaacagggcggctgctgtaaacgtgatttcctcgtaatctgcgatggtgactgtatttgcggctaggatagagcttagggttgtgcagaggatcgttacgaaggagaggatggcaagaatcgtatcgcgtcgccataatggccagttctaacagaaccattcgggtcaggacttttgtcgtggaaacaaattctagggtgcggtgctctctgggacataccaatgggtcgtttgggtcatcgctcggttgcggtacgaggataatcggctgattgcccgaccagtcgcatttaaggcctgaggcacccggggtctggtcgctcgcatcaccgttttgttcgtagatatcagaggtacctgaagttttgaagttgtgatgagccacgcggattcgcttgcgcctaggcgggtaaaggcatggaatcttacctgggacatgcgcgagcttcgtatcttccagtactccaagacccatgattgtaggaagccaacgaggcggggcttgtagataatgcagcggtttaatagaaattcgaacaaggtcagcagcgctacggagtaattctcgaccctccaaagaaggaagctacgtgaaaaagcttcccggggccaatggggataaatagcagatataaataaatacgagttcaacttgaggactatattataggactaaatataaggactaaccttggaaaagataagcagctcggtcgatatgtacataaggcccgagtgtgggcgtaattttgaatgtgatttgaggtaaatttcaagtctattgtacaatatacgacatgcaaagttccatctaagaccgcgtttgggccgacctttatgagtgaatatatgtacaggaccgtacctacggagtacatacgagttgcccaggtaagcctggatcggcgcttccaagcttagaccgaggcatcacattcaggctcgagcgtccaatattcggccgaggtgcaggtggatcttttacaagaatcaaacagcttggaatcagtgtttttgctgtagagaagttcgtgttgagatcagggaccgacccaccgagggggaaaaaaagccactagtgctgactgggggccttaaatttcccattcgaaccttgtgattggtatattactgaggtgtacaacccgaatggtcgtcataaagtagaaaatagagtgtggcagtgaattctgtaggaaacaaggcgatgggagaggtctatactcggaatatcgttgggaaataaatgccacaaccctaaacaaaaacctccacagctccatctaagcctccaggtaatttaacgaaataccaatacatggcagtctcaaaccacatacatttgagatgtgcatatcgattgattctacagcaatttcgcatcgtccatgtcctaagagcatagccaagcttttaaatacggactttgcctttcacaatatgcgtcgatactgaagaagagaaggacttgaggtccactgggcattcttgtcaacacgtgaccgctgatatcatgtgttaagtcatgtgatgaccagcgtcaccaacggctccagagctagactccaagttgtgaggcgcattatttccacagcagcggttacgacgtggtcgcgttccatattgaagtgacatcctcctccttgaagagctataccccgcgtcattgtcaaatcccaaacaccggcccccacctaagactactgcagcgagcgcgcgaagcacaaagcatttacgcaaaaccacaggtccaatacacctatccagcacatttttaattatgtcgtcggtctccccttcaaaggaacacgatcttgacccagaggcgcaatcgggggaagaacaagaccacatggacaaagatcaccacgacgcgcagggacaccaaggcgagtttgaggtgaaggagcaagatcggtggcttccgattgccaatgtggctcgtatcatgaagcttgcgcttcctgacaacgcgaaaatcgcaaaagaagccaaggaatgcatgcaggaatgcgtgagcgagtacatctcatttatcacaagtgaagcctcggagaaatgccagcaggagaagcgcaaaacagtcaacggcgaagacatcctattcgccatgacctcgcttggcttcgagaattacgctgaagcactcaagatctacctatccaagtaccgtgaaacccagtctgcccgcggcgacaatcagagacccccaagcgctggctatggagctggaggacctgttggtggccccgccggaggtgggcctggactagctcgtccgacgggcttccccaatcctgaaggcacaaatcctatgtcgaacctcagccttgacccgtccgagcaagacgcctctgcctacggctatccgcccattgtcggccagcctcacaacggcgcaggcggcgagtcatactagtggatgatgtgaaggggtcggctgacggacgctgcgcctagtttcaatattggctacatgtcctggagattaccgacgatgttgatttcaacggaggtctgagatgtttcagctaggggtctcggacctcagcaatgtgatgagaatggcggagtgttgagtttgcatacccgtgaacaccagcctaagataacttgaagaaatactgtaattgatgcctaactcaaacttgaagatttgtacgaacttacttaaatacccccgtaatataaataatacctttgaagatattaataaaatagtcctcattgctaggaagatccactttcggtgtaaaatatcaggagttctgatactatttaacatcatctccataccggccgaaccgcacgtgaaagagtctggagtttttgcggggaaaaaaggtaccgttcatctgcgtatcggcgtatttttgacctatctattggtttattaccacgacctggccacatggagaataaaacctctcacatttcctcccccaatcactcactttcatcagcctcaataggtatctgcaaagatgaaattcaccatcacttttgccctggcagctctattgagcactgccgctgctcaaggcctgggcgatctgcccgactgctcggtatgtgtttacagtcagacatacaactatgccaaatgtgccacctgctaaagaagccattgcatagaaaacctgtgctacgggttcaattccccagagctgcggcattgatttcaagtgcatctgcgagtccaagtccttcctggacgatgtcgcctgctgcatcgccgataaatgctccaaggctgaccaagaaagtatgttctcttccttttcctccatgcccaattgagtacgcaagtgcgggattattccaaaatgactacgcataatggatggcggaacatgtacattgggctgatatgttacacttcaccacagcaaccatcaaggtcgccaagtcaatctgtgcccgcggtggtgtgaccgacctgcccgccgaggtggtctgctcgagcagtaaatccagttccagctctggcgccagtaccagtaccagctccagctccagcttgaccgagactggaatcaagtctagcactgagacctcgagtacgacggaaacttcggattcgactactgcgaccaatacgaacgcttctaccgcttcctcgaacagtgcctcgtccgtctctgctgcggcgactagcactggtgtcgctgctcttgcccacagggattcttcgctcgtggccgctgctggtgctgcggcggcgttcgccattctgatctagcatgaggcgtgctagtgatttcaggggctggtacgtttggcgacattgaaatatcgtgatgaggatggtatgaatggaaacacgaaaatggcttgggatgcacctgtgtcttattttatccatgatataattttaattgaccggggacacggtatgtctaaatgccatcgcttttcaatggcggggggatatttcaagttaataatacactcatagaaaggattaccgaggaacctgtggaagtgctcaattctcgcgggtatcctccagcagcttggtcaggcgttcctggcgctcctcgcggagagtagcgaaagtctgtagagtagcacattagcatgaaaaacagccaacagggtcaattctgcccgattaatatattcccacttacccagaaccagaacatcatttcgaagaaagcaaaggtgaagaccaccctgttcttcaggcgatccagacctccaacagccgctgcgcttgtgtaagacgaggccaggtggtcacctctgccttgatagataaagaacgcaattccagcatacacggcaaagcgacaagcagcaacggcgacccagacgctccagtaaattgtcaaggaattagtgatatattcgggcaaacgctgtagcacctgcagatcctcggcggggaggttgccatttcgcaggggccgaatataagggagagcttcatcgagagcttcgtggaaggggatgttggacagtatgacgacgtcgataagggcctcgacgaagatgaggatggcacagaaggtgaaaggggattgttgcgggctggacagggatggaaagtcctgtatcatgggtgttagcagccaaaatcaaatcgaataggaagttccaatgcccatagggtataaatggacatgtgaatcgggcttgttgatgtggacatacaatcttcaaggcctctcctatcataaacaccagatcacagtcggtgatcacctcggggctcttgatcagatagccggcgatcacaatcagaaacacggcatgtgcctggagaagaagcttggatgaaagtaaaaccatggtgggcgagtcacaatggcacaagtttgtggacaagaggaagttcccaaagtacagacagaaataaataaacgacttggagttggtccgagtgttggccgcaacacatgtggggaaaaagcagctccggtcgagatatcccccaccaacacaacaaccgcgatgattggatctgatttacgacttgatgcctgctgattattgaactgcgtggattactagtggaacatcgccctgttcctatcatactacatagtggtccaacccccatcctctacaatgaccgacccaaacccaaccttcaacacagagcgccatgtcaaatactacctccgatgcctgaagaccttcctcccgtccgcctacacttccaatgactctaatcgtatgctccttgcctacctgaccctctcgggattggatgtgctcggcgttctccaaagcaaaaccacaccggaggaaagacaagggtacatcaactggctctaccactgccaggtgccttcgggcggattccgtggcttcccaggcacggattttgggccaggaaagcgaaataaggataatgaagcctgggatccagcgaatgttcccgcgacattctttgcgctagtcaacttgctcatcctcggcgatgacctgtcgcgtgtcaagcgacgggagtgtcttgagtggcttcctaaagtccaacgcgccgatgggagttttggtgagcttgttggtcctgagggaagtgtagggggacctcgtgatttacgatactgctgttgtgctgccggtatacgatatgttctgcgcgggcggagtgagacggggcttgacggtgtaccggatatcgatgtcccaggttttgtttcttttatacaggcatgccaggtatgtggagaccttgatgttttttctgcgattgggacactgacacagtatggcgaaacagacgtacgacggcggcatggctgagtctcctttctgtgaatcccatagtttgtgtctccctttccaccacctggatcatctaacaaccgacaggtggacacacatattgcgcggtcgggtctctggacttcttgcgccggacctcaaatgatctagaatcagtgcccctactattggcaggctccaatcaattcgaggctttggttacatggctggcttcaaggcaaacagcccagctggaggaacccgatgaagacgaagattatgaacagcttgagatgacagagacgggatctatcgatgatagagtccgcaggttacccaatattgaacccctcggggccgacacaataccatgcgccgggttcaatggccggtgcaataaatatgcagacacatgctattcattctggaacggagcgacactgatggtacgtggccgcctagctagtattgagtgtctactaacgcgaatatcagatgctagaccggtatttcgtggtcgatggagatcgcaatcgtcgatacttgctcgaaaggacccaacatcttatcggtggatttggaaaggggcccggggatcctcctggtaaggcgatagtattctgatatcgagactatgttgctgaccaaacctatagaccttcttcactcatactttggcatggtgtccctggctttccagggtgaggtgggactcagcgccgtcgatcccacgatgggttccagtgaacgcacggtccgacatcttgaatcgctgccttggtggcaatcatgaagtatatacataacacgcctgtaaaatgacgatggttcattccaccaattggctcatgtcagcacacatcagccaataggtgtcgactaagttaattgggcgtcggtgtacatcgtacgttgtacatgtaccgtccacaagtaagggttgaatcttaggccgtaaggcagtgacaacacatattcttctacctacaacgcaagattatggcgatcgtgatcaatttggtgcttcactatggagggattctagccaattaagtcgcatacctctgaagcaggtaatttgcacagcgtcagcgattcctaaatagaaacggaggctacggagtaatgtatattgtatctggtataactattgcacatcaagataataatagcagactccaaggaaaaaaaaggagaaccaagtgccgagttctccacacggtccacgttcccgttgacgtcttggaatcttccaaggcctttgtatgcaatttcccttatcctttcatcatttgcggtgttactctatttctccggccatctttccgagcccccagctacccctttctaaaacttctcgacctccactccgctcataccgtttatccgcgcatctcgtgtcccgttgaatggccccggcacaactatttccagtcaaccccttgacgcgcagagactctcttgacgacatttggcaatcataacatatgccgccccgaacaagagcgggggttcaaagccagaaacaaaaggagaaggtgcgtcatcagggatgcgacatagggagctccaccgggtttcctttgttcgagccttgcgcagagtccgtggaaatatggctaactcggaattctcgacagcttgccaactcctacaatgagctccttgagtaagcgatcttgcttccggtctggatggtcagttgcgctaacgtggtgcttctctacagggagttctcctccaaggatcttcggactgtaggaaattatacattggggcggctaattgggaaaggttccttcggcaaggtttatctcgcctcgcataagctcaccaatggctccaaggtaggtcatatcatacaaagaaagttgtgggggcaaggctgatcaagttcgcaggtggtactcaaatcgtccagcaaggaggacaccaatctcgtgcgcgagatccatcaccatcgccaattcctccaccctcatatcgcgcgcctatacgaagtggtggtaactgagagcctcgtttggcttgtgctagagtattgtcctggtacgtcggcttgcgcatggcagacgcatagagaaacatactgacaaagctcggttctaggcgacgaactttacaactacctccttcgacacggccccctaccggtagagaaggtgaagcgcatatttacacagttggttggagcggtcgcctacgtccacagtaaatcctgtgtgcatcgcgacttgaaactggaaaacatattactggataaacaagaaaacgtcaagctttgcgattttgggttcacgcgtgaatatgaaggcaaggctagctatcttcagacattctgcgggacgatatgctatagcgctcccgagatgctcaagggggagaaatacgcgggcgaaaaagtggatgtatggagcttggggatcattctatatgcgcttttggcaggcgagctgccgtttgacgacgatgacgaccaaatcaccaaaaagcggattctgtcggacgagccgaccttcaacggaaagttcacggacgatgctaaggctctggtcagtctcctattgtccaaacggcctttgattcgacccagtctggatgagatcctggcacatcctttccttgcggaacatgctcctcaacaacttgcaatcctgaaaatcccaagaccatcgccatttactacgccactggagaagactaccttgcagcggatgaaaagcgctggggtcaatattgacgaggttattgaaaatgtcttggctcagcggtgcgacccactggctggctggtgggccctactgattgaaaaggaacaaaggaaggaaagaaagagagagcgcaagcgtcgggagcgggatgctgaagcaaaaaacattcgtcgtctgagcgctaccagcagtcgcctagaaaagcgatcatcggctttaatggaggtggaggaagaaggcatggggttgcgcgatcgtgggagacgggatagaagaagcttaccatcccagttggcagtgccagatcttcctgcgcttccagaaccgctccctgtattcccaattgaggtgaccacgccaccattgccgctcgacaaagattctatacgatcccacaactcgacgcgacggcgcccagtgcctccgccaaaagacaggcggcgatcacggcccagcatactgcatgttagcgcatcacagccggagttgacacagcatcacggcatcttccggcgtcgcactagtcgtcgtcaccagtatccgatactcagccaactagcgtctctcaaacattggtttgtagagtcggcgaaaagagcgcggtctccccatgccaaatcgacgagctcgcggaagtttctttctgaaaagttgagcccggctaagagtcaagatactgggaaaacccctgcacctttagcgtccccagcaagcgaggtcgcaggggaggatgttgttacacccacccaggcaaaacgagcctccaatgccagcagcctcgctcctagcagtgcctcataccgccaaaaccgccactcttaccctcaccagccgcgcccattgaacaccagtcataatagtcatcgaaactctctctcgccctcacctatcaccccacgcgggtcctatcggcgttcatcggccgggctccgaggtcgcaaatccacatcctcctcggtatcatcgatccgcagcattcaccacgctcgtgctcactccaaggcctcttcgatttcctccaacagtgtggatactatctcgacacccactgccagagcctccaggtcgcctcactcatctatcaaagtgctgcccaccactccaggcgcctcatcccgctttccgagcaatattcggttggtaagagggccaggcggagcacctcgagagttcggtgaccacttaggtcagatgccgtcgtcgttcaacgaagcggtaccagggccactgctctactcaccctcttcaagtctggtgtttgcaaggcgaaagagatctcttttcaagggtcctatgatccataccaccaacttgatggtgtctggtgggatagccaactcctctatgccgggtcagccaatggataccagcgggcctgacctcgcaccagggcggcctgctgcacgcaagagccaaatcatcgaggaagaggaagatgtcgaaggaattgaggaagaaattgaagaagtcgatgagttcgaagaacctactacaccaggaggtttctttacccctgatgagcagccagccgagaccgaatctccctcaagcggcagaacaccatttgatcctattctaaaccttgataccagtccccttcggcctcctcgctcctcctctttgcgctcgccgtccgataccccagacaagatcggcatcgccgaataatactccacccgacagcttccttgcaatttcccatatgtgcattagattcgggtgttcctttgtccatcccacgatcccttattcctatgtttgttagacgatagagcttttatacccccacttacacagcgtgtttctttttcatttccctttacttgtctctttttcggcataattggatccaccgttggacctatgcctctccctctcttgcgctcttttccttcacatttcctagcttcgtgaagcgctttctcttccctacttctccttgctcctcggtgattcgactctcgcttgattttaatgtcttttgcatagaattcccctgtctcatagaactctgtcccatatcatattgctggattgatcagcaacaaaatacttgcatgatgaaattgcatagacctatccactttgataatccccgagagttcagcttaccacaaactgaccggtgggctggcccacgtgagctccattgtcatggctctagggtggatcgttcctttactggagatgcgaataactatctgataacttgagcgtgaactagtgatattctatgtcgagagccaatatgacatggtaggatagttgctaaagacaaagaatagtacaattcaatgttgatcaatcaaaggataaatacaatcgtatatttatacaataaagattactcttgctttcactcaggcctttggtgagttgtgacaagcctgtccatgggtccgactacaacggtgtttggtatcatttggaatccggcatcggagggatgtcttgaaatctcactctcatttccaaccacccggctggaagttgttgataattatctcaggacttctatcacctgaatatcgaagcagttcacacactcattcaagagtgttatcctagtatcgaccgcatgtctcatcaatggacagatcagcttccatgaggggtctaccacgatgtctgaactgtctcactctttagcgtccaggctccaataatatcatattcataagactatcatcttttatgggggtctctactttacgatatcattcctctccaaggagattatcctctatatgagggattttatatcataacggtgacgactctgacgtcggtttcctaatatcctaccatgttgcctttgtatctaacgtttatacagtggtccatcacacagttagcgacattatccaagaaccaagaataccacccggtccttggcctgtttatccaccttcaaaaggctacagcaacatcgacaccccatctgaatgagtctcctggaaaagagcatctaaagcgacgaggctgtcgatgagcgaaagatttatgcgttcgctatctcactgctaagggggagcttgccaattgcccacgctttatatatatgctagcttctcgggaacgaaacttccgaaattgttgctgtgaaaatgagaatggaagagaaagcgctcaatgcggagatcttggaggaacgcggacattcacccaggcctttggcaagctgggagttcggcttgctctgccacaaattgactagtcgcaactactgggaagactttccacttcttcaagatctcgaatgacttcaacgtacgttatactcaattcgtgatggctattatcctatctaatctatatcagtggtcgtcggtatatgttttgggatatgttttgacgtgcgttcgtgtagcatttccaggccgcttggacttctcgtccatatattctaccgtgccgctatcatatcccctgcatactcggaggagagcttatgccaatccaactagtaagagatatctggtggtagcgccgcttttaagaccgtcgacgaggatgataaaatggaggacttggttgattagcttttatatctggtatcaatttttttcttttcctttttcattttatggtacctttttccatttgagctttgaaaagattatcgatggtttacgcttacgtctatgactcttggatactcaaattagttatggtcatcgcctgttactctataaagagaataatcctaggcatggaaattcaaggaaaatactaacatccattattcattaaccattaccctagaggatataccgaaagcagagcaaatagcaaccattcaccgctctaaatgaacggcttggtgcttctcgtcatcgatatcatgagagtccataacagcctcctcgtctttgatattctgactctcaagaccaacgtcactcccgccaatcctatccacggtatcagtatacgacggaacaaagttcacagcaatagcgtaagtccaagcgacgaccataaactgcaaccagcattagccaccgatctaacagggtagatacggaaacgaaaacaagaaacccccatctaagagcagaacataccatagtcggaacaataaacgcgaatcccgtattatcatgcatatcagcaacatgacccagaataggcggcaccacagcacctccagaaacaccagcaacaataaacccagagccgcgcttgtaatggcgtccgaggccacggattcccagcgccatgatcgtcgggaagcaaacagactcaaagaagagcgtcatgaacagcatagcgagaccaacctgcttggtctgcgtgaccgacgcagcgaggaacgctaccgtgcacgttaaatacagcaggaagacccagcgcgcccgcacgaatttcataatgcccgagccgaaaaatctgccgactgcgaatgcgccctgtgccccagcgaggtacttcgctgctgtggcgctagatgtacccgtccaggtatctttgacgtagttgatgaaatagcctgcgatagcgactgaggaaagagttagcttgatggaatattaagagagaagtataagataaagggtggtaggaaacgcaccctgcgcgcctgtatacgtgaattgcgccagtgtcgcatggaaaagcttgtactgtttccagaaaggcttatcctgctcgtccacatgcgtctgcgtcacctggaaggccatgtcctcgtctgtgacttcgggaatattggagaggaagaatacgccggcgagcaagaaaacgaagaccccgatggcgaggtagacccactgcacgcgctgcagggctgctacatcgtcctctgtctcggtgaagaagacataagagcccagaacggggccgacgactgtgccgattgcattgaaggcctgggcaaagttgattctgatctcagaatagcggggcggaccgcagactaggcagattcaaatgggcagctattaatgtctatgcttaattatctgtggagcatatgaatgtcttaccggttaggtagggattagccgctgtctcaagagaccccagtcccgagccaatgactaatgtggcaccacagaagccgccgaaggattggtttaaacctgcgggccacatgcacagggctccaataccgtataggcacagaccgaagatgaagacggtcttgtagccgtagttgcggaggatccagtttgcgtagccgagggaggctaaggggtatgcgctgggttttgttagagtggtatctttttttataatacatatgttatcgagagattccatacccaaagtaggctgcttgaagaccagctgagcggccacggtcgatatgtagggttttctggaaatgtgagttgagggtgtccagcaaaccatacgcaaagccctaattgaagtcttagtgggaggactggctataaacgagataccgtagcatacccataagaagaataaggtcgtgactagggtcaagggccacagactctgtcgtagagtcagagtagcagcagaagtagtcgcacgattatcaacacgcaagcccgaacggcttttgaggaattccttgacgcccatagtcctcggtatataaaaaagacaaatacaatagagggatcgaatgaccaagcggccaaatggggtatttaaatagaaaacgaaacaaggtgacaccctgatttccccacaagtcaccctttaccccaagtccggggaaagccagacgatccctggggaaagaccagcaacgtccaattacaagtcagaacacggagtttcaccgaggatcgaaggtcactttgattttttccccgctatacacccctggagaggtggcgtcagcgttgcatggttgttttaatgctattcatatttaggctatgcaagttgttctctcccgtgtctggtggaatgccactccgagctatattgagttagtcttactttactatcctagatagtagtctagatgacatcctaaggactatcatacatcctcctattagttcatgagagctatagatgatgatcactttgatagccgtagacaaaagccgtgtctattacagaatcacatgatccatccatgtcgttccaatattggaaagggatctccaagctagacgagggcgtggaatcaagggacaaaccgggcaagatcgacacatcttcgaataagctagtttatctacgaagacacagtacatattgtcctactgtccacaaatacaacaatcacaggttgtaatctttcattcggctgatctatgggcgttcatgatagcagtcataagtaatccacgcactctcgtattcaatgcatggcaaatatctagccaatcaggcaaaatctatctctattacacaccggttagttagctcctgcgcgagcagatatctaggagggtagggtccaatttagacccatcctttatgcccgcttgggcttaccgacggtaccgctctgggcgaccgggttgacggctttcgtgttgtaaagacgacgctcggccaacttaaggacctcgtcaatcaagctggaatgtggattagtaagatattctttcaggattaaggagaaatgacacatacatcacaggtgcactgatcaccaacaccgcctgccattcattccagtccatgggcagaatcgagaacaggttctggaggaagggaatgtagaggatggcaaagtgaaggagcatggacagagtgatagcgtagataagcatggggttgttgcccaagaagaaagtcaggagggactcgctcgaggacagcgcgttcatggcgttgagcatctcaatcaccacgaggatggaaagagacacggtggaggcagatttgcccatatcgttgctgaacatttcgcagccaatctcggggaactgagaggcacacttgtggtagtgggactgaattgacctggttagcaacacgatcaatacctggaaactttagagacttaccaattgccagaaagagatgccaggaccatcggggttgtagacaaaccaccagacatagccaaagacggtggcagcaccaacgtagatgccgacaaccatgtagcggaacaacaaccagccgccaacaaggggctcgtcgcgacggcggggagggcgattcatcacatcgtggtccggagggttgaaggacagagcagtggcaggcagaccgtcggtaacaaggttgacccacaacagttgaacgggaatcagagcctcgggcattccaagggcagcagtcaggaagatagagacgacctctccaatgttggaagaaatcaggtaacggatgaactgttgagtgttgctgtagatagaacgaccttcctcgacggcgacggtgatggtagcgaagttgtcatcagccaagaccatgtcagaggccatcttggccacatcggttccggtacccatggccacgccaatgtcagccttcttgagagcgggagcgtcattgacaccgtcaccagtcatagcgacgacgtggttcaaagactggaggagatcaacaagcctagacttgtgggtaggctcagtgcgcgagaaaagggaagcggtctgaacggcctgcacctgttcactttcactgagagcgtcgaattcacggcccgtgtagctcttgcccgtgagatcctcgtcggcgccgaacacaccaatggagcgacagatagactcggcggtattgcggttatcaccggtgatgacgataacacgaattccggcggcgtggcacttcttgatagaatcggcaacctcaggccgagggggatccaacattccgacaagaccaatgagagtcatgttctgttccagcttggtgtagtcctcggtggtggtggcgttcttcaggagggggtttccagagacaccgtcaacacttgcgatggccatgacacgaaggccacggttaccatactcaacaacttcctcggaaagaagcttcaagtgattctgagtcacaggaacgcgagatccattggcgccttgaataacgtacgagcaacggtccaggatgctttcaggggcacccttgaccagtaacttttgtgcctcgccttcgccaacgagaacagacatactcttgcggtcacgggagaactcataggtggccttgaggggaagacgggactcgtagtgagcgctggcggcatgcaatttttcggatgtagggaggcgacgaagtttttggttcaaggcgatgtcggtggatccaattttctcaaccagagtacgcagggcgccttcagtgggctcaccgatgctggagaagactccgctcttggcatcgtgggaaagagtagcgccgttgcaaagggcagcaacctcggccaattgtgccacggtcgatgaagaaacggccaggttctcgacaacattgccattctgggtgagcttgccctcgggagtgaaagtagtgccttcgacgtcaatctcctcgaatccagtgccagagctggtcaggtaaacaatcttctcgacgctcatctggttagtagtcaaggttccagtcttgtcagagcaaattacgctgcagctgccaagggtctcgacagagggaagagaccggacgactgcgttcttttgagccatcttgcgggtacccagagccagacaggtggtaatgaccactgccagaccctctgggatagccgccacaccaagagagacagcaatcttcagatagtagatagctcccttagtccagccaccgaacgcggggtcattgaagttctcatagttgataacccaaaccaggacacagatgatggtaataaccttggcgagcatgtcaccgaagtcgttcagcttctttttcaagggggtcggctcggagatctgagaagtgatgctctcgtggatatctccaatggcagtcgagctaccggtcaacacgaccagagccgtagcgtggccgttgacaacggtggtaccagagaaaagcatgttgatctggtcctgcttgacggcctgctcatccttgatagcccgggtctccttcgcaacactttcgctctcaccagtcagaatagcctggtcgacacggaagctgttgctctgaatggcgagcagtcggcagtcggcaggaacacggtcaccgacagcaatttgaatcacgtctccgggaaccagatcttcggccttgacccttcgcgtcattccatcgcggataaccttggcctcgttggcggaatattcctggagagctgaaattgccttttcggcgctactttcttgggtcactccgacaacagcattgaggatgaggatggtaaggatctgtgaacaacagcaaacctcggtcagcataatagaacacatgggtatacagatgcaacgcaggatatccaggcacttacaacagcggggtccacaaatgcggtccaatcgtcgctctcttcaaagagagctagcacaaaagacacggcggccgagccaaggaggataagaaccaattggtccttaaattgttccaaaatcagttcccacatgggagtcgggggttcttccgcaatagctaaataaacggcagatgtcagttttagccatgtcatcattctgcagcggggtgggtactaaccgttcggtccatactgttgtctggaatggaagaccgcgctctgcgacagaccagtctgctccgacaccttgaagtgctccagcgactctgctggagtacggagaaaggcgttctccatgatcgcgacaccctcaacggcaataggcaggatcaattgcaatagccgcagaggtgaggaataatagttggggtaaagaaggaagaaaaaaaatgggtgcctgtttttaagatagttacatgcccggtgtaacacagagtcgggaaagagaagcagcccaaagcgagggacagggttatattaaaaaaaagaagatccaaagcaagcttggaagaaatgaagatcgaccgaatggggaacctccagtgggggaagtcaacgtgttctcatccatttgattccaggcgctgagtaagcatggacctacctgcgtggggagggcgccccgggggtctacagggctgaaggcgggtcacttgcaattctccgcttcgttttctcttctttctcttctatctttctttgattctgccttggattgagtatgaacgtattgaaagtacctgatacttccgagattgactatctttagcataataagtctcactatatcatgaattggagcgaaagcctctggtagggctccaacgtcatgtcaattcccagcttgccctatgggtctctaggctgcatcgtttcttgcctattagatacatgtaggttttgtgggtaacctttgatcttggcaccttcctaacaagatgagtatgcaatcttctaaatcttctaattcgaccaactcgactcctcactactagtgtgatatagatggacttgtgccatgaccacagctcttgacctatactcggttatcccagggctccggagcatactggatccaacctactcggcccacttatggttggcagggctgagatcttcaaggctaaagcacagtccctgctagatgggtcaagtgtggcatcttcataagcacgctaacatacccttgcctgtagggctgaagctagaaacaaaagtccatattgcatcacttagctatagatcatctactcaatgcctttaaaatcgatttaaatccttaccttggctttgaagttggccaaatagtcatttcaagccacttttagtagccacaaatagaagggaaacgaaagtagaaagtctcttgaattttgctatgcattcgccgatcaattgtgatatgattagtctgataattctagttggttaacctttcaagtttgggaataatcaagctgtggaggtaagaatgcatacggagtactccgtacgtgaacaagaaaccaagcgcctgagtgtctggatgcccttttacatgtccattatgtctttgttcaaaccaggtcaaaataatagtaacaaatatagtaagagaataaaaatccctaccttagttccaactcgcttgaccgcaagttatcacatgctcattgaggatccttagatagtatgatagtagttcatgggggagaaatttaacaaatgtccgaataaaagcgattgctaacaatatatttcactagaatacttttagtctgaactacttgaattatttgaataagactagaatacttgtgatacaacacctaatcttagtgtgtggccgatcaactacatcataaccgaccctattgtctggaaggttctaagagatttgcatcattatcatccccagactcttgcaatgccactgtgatttcactaaaatggaaataaagtggtctctacctcagcacctccagggctagaatggtgtcagttaggtatcggtcggagtccctatgacaaggtagtatggctccatagatacacaaaggggtgtctaggtacgaatcagctagaatcaagccatatatcatactagtccagtctcccgatgtcctgaaaaggagagtcctagtctaatattagcagtacttggtaatgaatacggtcatttataccccaccccgctcaaatgaattccttgttagggggatcgaccgtaaaatgaatactgggccgcggcccaagtaccgtagtacttccacagagcggtgccacaatagggggaagcaggtaccgggtacaagaggacatcgtattattgttatgatccaaatccccccaactcacttcacatcatctctctcccccacttggtcgtctctacccatcttcttctcctgcatctcgcgtctcctactcctttattttaagtctcaagttctaaccacctcgattcaatttcacaatgggttctgaggtacgtggctgtccccttctatcggctgtctcgagttgtcaccgccatcgcaatcccacattcccatcctcatctgagctcacccccatctggaatttttgttgataagaaccgggctaacgagtatcgtaactatgcagcgtgagaagtatgcccatcgtcgcccctatttctgaaacctcgtggcatgactgaccccctcaccagcaagacgttcctcgcgcggctctgcgagcaggccgagcgctacgatggtaagttgacatgcgatggtttggctggatggatatgctgacatgttgcttcttgcttgacagaaatggtcaccttcatgaaggttagtcgcaccctctcgtgttgtttactgagtatccatgctaattgctgaacaggaagtcgccaacgtatgacaccatcattttcccatcacttttgggaccactttgggggtattcgaaattgacacatttctagattggtggcgagctcactgtcgatgagcgtaacctgctttccgttgcctacaagaacgtggtcggtacccgccgtgcctcctggcgcatcatttcctccatcgagcagaaggaggaaaacaagggctccgaggagcacgtcggcatcatccgcgattaccgccagaagattgaaaccgagctggagcaggtgtgccaggatgtgcttgatgttcttgatgaggctctcatccccaaggccgagactggagagtccaaggtcttctactacaagatgtacgtctccaacgaaatttgctttcggtctgttacattttgctgactttgtaaacaggaagggtgattaccaccgctacctcgccgagttcgcttccggccccaagcgcaagggtgccgccaccgctgcccacgaggcctacaaggtaaacaattctcatttcggcttattgtcataggccttctctctttgcaatgaacagttgttgatcgtgtcatagaacgccaccgatgttgcccagaccgaactcactcccactcaccctatccgcctgggtcttgccctgaacttctccgttttctactacgagatcctcaactcgcctgatcgtgcttgccacctcgccaagcaggcattcgacgatgccattgcagagctcgactcgctctccgaggaaagctaccgcgatagcactttgatcatgcagctgctgcgcgacaacctgaccctctggacctcatctgagggcaccgaggccgagagtgccgccaaggaagagaagtccgaggaggagaccgctgctcctgctgttgctgccaccgaggccgctgctcccgccgaggagaagcccgaggaggctaagcccgtcgagactgaagcctaaaggaacattaggggtcgcgacgagccgtatgccgtttggtagggtgggcgttcgcatttattcctggacgtggttatgcaagtcgcttctttgttttcactgcagcgctgggttggaccggcagatatcttgcacgtcttcgggaccgtgtgggtcggccggcggagtttgatattcggttgacgcgagcggaaaaggggctgagtggaaatttctctctcttttattgtctctattcccactccagcacgtttcaatgtgtttattttccattccacccgagcttctctacttgacatgcaccctgtgttaggttgcttgcgtagccaatgattccccttttaccagtattcatgactgaagtataagccgatagagtaaacctagttattcctttattcctttcactcgactcgctggttgattagtcctaaagccttgacgaacacagatatctacagatgagcatgtgcattaatgcttcgaagttaaccaaattcccactgtcttcccctatattgcttacccaaagctgccatcatcctcagacacatctgaggctcatctctaggaaaataccggcacgcccccacctccaaagcaaagacaccggcacgtctgataattccaacaaccaaaaagcgccacagaagacgccatcccatcaagcaccgaagacgcagaaccaacaccatcggggaccaacatccctcgaacgattcgtcggagccaagagccggacagcaacaccaccgggtccaatgcggctctaacaatccccaacccgctatctcccattctcgaagtgaactcaaccgaaacacacgtcttcccaccaacgaagagtagccaatcgaaaccggacgttttgagcgccacgggagggtccgggcacttgcttgaatatgacagctgggcaggcgggcatcacattgcatgcaatgcatactgcaatcgtggtgtggtgacaggagagtgggggaatgccacgagggcgaaacggcggtgttggcgaattgtggctggaggggttgaggatgcgattggttttgttggttgatccctgcgtgtgtgttatcttactctctttgtggtataggtggactggcgaagtttgtttcacttaaggattgcatactcgctaggttttgtgtctgcagcgagtcagatgggtgttatagagtatgtgtttttttggatgttctgagtatatggcacaatgtcgattgatatagatcgaatttgtcatgaagcctttattcaatgattttgacttgtgttggtcccagagcctcatatcagggctcttaacggtcctatttgtttgcttagttcttggcaacagctgggatgaatgcaagctcttcttgtcgatcttttctaccgacctgtttctaatgaaaccgattgaagatgagcagaaagtctgaagtctacgatgtcggtaaatgatttaaatttagattccaatatatagttagatgaagatgcaacttgaagagacctgacaggtatcattttggtgaatgaaattgagcatgtagtcgctgtacgaagatctcctgtatcatcttccataggtagacacagacacatgaccaagccaacaaatcctagttcattgcacttgcatacatatgtatgtagtatgcacagctacatcaccccagttatacggaccctatcatgcaagtagagattgggcagatgcattaggattagaatctcgtctagagaacctttctcgattgcccccggcatgcatccgactccatgccatcgggatattccaaagatccgcgggatgtacgaggtaaaagcaatgcacatagtcaattccacatcttcccgcaacgcgttatataaaataacgccgaggacaccaaaactacacaaaatcttcatcttaagcagtcttttataacaagaaaccccaaaagaacaatccaatccaatccactataataaccaaaagtcccaaacaatgtcactcccacaacccctgcccctcgaaccagacgccctctacatcctcctcttcgacctaggcggcagctgcctcttcgaatggagactatacctcgcgtcaacgcacacaaccggccaaaccttccacataaccaacgagacaggcccagtaaactggcaatacaaaagcgaagccgtgtacaacatagcaagcgacatgcgggtggtgctagcgctgcaaattggcgtcgtcgggcccgtgctgcacgccgcgctggggtcacgtctggcactcatcccgctgacgctgtactcggctcggttccgggagggcctttcttgccgcgtgtgggtgcaggaggggctttttgcgttggatgatgagggatatctggatcttaccaggagtgttgcggatatcgagcaggaggctagacagcttgggatgctgaataaaagtcgggggtctaggtcggtggttaggagtagggggtttgtgggttgaatttatgattgtaatgggtggttattagctgtgggggttgtcatgatgtatgtgaagtcatgtaataatcggaatggattgggtctttctttctatgggttacttgtgcccaagcatttgagataggaggggatgtacagagcgatgttgtggaaaagtagaagaaaaaatagaaggggtaacattggacccggcagagataacctgcatataggtgaggcagaaatagaagatgtagatcttccttttaaggtgcgtattttcaagggatcaggggggaaaagcgaaacaattcaaatggagactggtcgtccgtattcacattcacataaagtcatcatccccaagatcatcaccaccctcgtagttggtgtgatcgacctggctgtcgcggctggcgttcagcgagatcttggtctttgccgccttggacttcttattgcccttgtcagaagcacgctcctcgcgcatcttctcgttggaagcagtagtgagagcactagcaatcttcttgatctcagcactaggcaagtccttcacaagcttacgggtgaagtcctgcgcccagagagagtagtggggcttcttggagtgcaaggtgaggagcggcacgagggtatcactcagacgggcgaactggtccttggtgacgggcttgaacagcggcatggcggacagatcgacggccttggtaggatctgttgagtcgctgacaacgacggccttgggggcgcccttgttgcgcttgagatcaacagtgccgaaaagatcctcggcgtgggcaagatcggcttcctgctcggtcgcgcgcagacgagcgcggcggtctgcctcgtcttcactctcagattcgccgctgccctgttcccgtaggcgctgtagccggagttcctctatccgctgggctttggtcttcttgttggcggcggcgacggccttggccttggcttcggcttcggcggccttcttggccttctcgcgctctacctcggaatcttcggcggcatcccatgagtcaagaacctatattcggggttgttagtttgttgttccttggcgcgaaggtgaggggcctgctggacaggttcgaggttgcgttgccttacatcttcttcctcttcgtcatcgaaacggcggcgaggcgcggcaacaataggaggaggcgcggagctctcctcttcttcttcatctgcgtgagatcaaaaagattagcaacagcaacatgaaccaaaacacgagctaagtaactgtggcaatcgctatagaaggataatacaaggataataacataccccacttggaaggcggcattttgagcaatctaaaaactcgttgatacgaaagaaatgaaggaacgtaatgcgctacacgcaaggccaaaaggaacaagccaacaacaggacccagcaatggaggggcgagggcaaattttatgtgggacacacttatcgtccccaggtgggatgttcacgtgatctcgggcattggatgcccgatgagcatgatctttgttcgtatcccatacatataggctgttcatttacttatttctaacttatcaggtggtggaaatttgttttcattgaaaaagatcctattaaattcataatcatcatgggcgatggctccgtagatcgtccaaccatcgtttttgatgggccctcatcaggcccgatctatgctgccgaaaggcggcatttacaggttgacagcagtgcggaacttctcgccagcgtagatagcgttggcaccaagctcctcctcaatacggaggatctggttgagcttggcaagacgctcggagcgggcaggggcaccggtcttgatctgaccggcgcggaggccaacggcaatgtcagcaatggtgacatcctcggtctcaccggagcggtgggagaccatgacaccccagccgtcagcgtaggagtccttggcagcctggatagactcggtcaaggtaccaatctggttgaccttcaggagaagggcgttgcaggacttgagctcaatggccttcttgatgcgcagagggttggtgacagtcaagtcatcaccgacaatctggaagtcagaggtcttgtagaagtagctccaggcctcccagtcgtcctcagcgaaggggtcctcgatggagacaatggggtacttggcagcgagcgacttgtagaggtcggcaagctgctcgtaggtgagccacttggtggggtcgctctcggggttcttgaagtcaagatcgtacttcttctcgtccaccttgtagaactcgctggaggcaacatccatggcaatcttgatctggccagtgtaaccagcctgctcaatggcctcggtgatgaggtccagagcctcctcggcagtctgaatatcgggagcgacaccaccctcgtcaccgacgttaccggcagactgaccgtacttcttcttggcgagatccttgagcttgtggtaaacctcggtaccctggcggagaccctcggaaaaagtgggagcggtactgtatttggtcagtttatagttgcaataaattcaaggctggaggacctactcgggcacaatcatgaactcctggaaggcgagacggccaccggcgtgggagccaccgttcaggacgttctggaagggaacggggaggacgtagggcttcttggttccggcaaggtcggagatgtgagcgtagagggggacacccttctcagcggcgccagccttggcaacagccagggagacaccgaggatggcgttggcaccgagcttgcccttgttgggggttccatcgagcttgttcaggaactcgtcgaccttggcctggtccttaacatcgatgttctccttgatgagggcggggccaatgatgtcgttgacgttcttgacggccttgaggacacctaatttgagatgaggatatcagtttctgatcactttagaggtgtcaaccgggttcattcacttacccttaccaccccacttggtcttgtcaccatcgcggagctcaacggcctcgtgctggcctaggagtgaatgttagcattgaggtcctttttcccctttttaccatctagacttcaaggacaacataccagtggaagcaccggagggaacaatggcgcggtgaaggccggtctcggtaacaacatccacctcaacggtggggttgccgcgcgagtcgtacacggagcgagcgtggatcttagagataggcatgttgtaattggacaggctgatgatagattcagtcagttgtaagaaaggagaaaaagcagatatgggctgatatatggcaaaagctgcaggtgactaacggcgggggaagttcaccgatgacccaaaaagattgggcgggagaggtgagaaggatatgatttgcttggagagagctcaacgaggggcaagttcctactacgatcaccgggaggcctttggttgggtttctgttcctttccagaagacttgggagggttgtagcaggtcgttggagggggatatgtgtactttggaggggtagatgatggtgttatggtggggtatatgatgttatggtggttatgatgcgatgatgctatattcagatactcacctgttaaatcagaacaacttgataaataaaaggagacctcctacggacacacccgactacttaaatactttcccccagagaaaccccgggaaagctcattgctgctccgattctttccaatgcaacagtggggctccacggccgctctccagtactcgctggctggtccgaccttatgcggcctccttagctacgagatctcccgtccctcggaagatattagactatgatggcatcccgttctcccgattgccttccttgttataggacgtgcacatcgtacggcatacccctctacccctctattgcgcattagtctaactgcaggattgtttactgttgtctagaccgatgttaccttcagggctacgtggttcgaaacagaaagtggtcatcttacgtagcattcattcgtgttcattcgcattcattcgcattccttccaaggttccactctgactctggcgaaccttggaagacagcagttggcgcctgattgctaaggccaagctgtctcggaccgagttccgggctaatgatcttcctttccgggcagtttccattatcaattcataaccagaagggaaacgaggactggttggacagtataaaggaaaaaccacaagatataggcaatgcatagagaccaaagggagaagaaaaggcccaaaagaactgaaagtagaggtcaaacagatggaggctgaataaatagggaatccaattccaaggtcatcatcaccacatttatcaagtcttattacatacaagaatagcttgggttcttgaattcaaacttgtcaaacttattgccttacgctcaaggctgtgagagcgttcctgccttaggtgtctgttatgacataagacaactcggaggtcatgtgatcgtctcaatggacgccgcgctggaagctggaagctccccaggcaaggtgctatcttcctaatcacgatatccatccatttcgcatcgaccttatacgaaaccctggattcatactcgaattacagtctttctctggctaccatcccaactcgtccacactcggtgaatctatcgttcgtccgtccttaatcatgagcgacccggagcgcggccaggcgctcgaggaatataaaaagagcttgctcgagctacgagaatgggaggccaagttgaaaacccttcgcttgggtatcaaggatcttcaaagagaatttgatgtctccgaggataacatcaaggcactacaaagtgttggtcagatcatcggcgaggtgctgaaacagctcgacgaagagcgatgtaagtatccaaggctcaagatattcgtttcaatgatcgcattaagaagctaatccgctgtacagtcatcgtcaaggcgtcctcgggtcctcgatatgtggtcggttgtcgttcaaaggtggataagtccaagatgaagcaaggcacacgtgtggccttggatatgacaacactcaccatcatgcggatgctgcctcgtgaagttgaccccatggtgtacagcatgtctttggaagatccagggtccgtcagcttcgcgggtatcggtggtctgaacgaccagatcagagagctccgtgaggtcatcgaactacctctgaagaatccagaactcttcatcagagttggaattaagccccccaagggtgttctcctctacggtcctccgggtactggtaagacgctgcttgcacgagcagtggccagctcgatagagaccaacttcttgaagggtatgttcaacttctgaaagcatttacagctgcgatgttctgaccggtctactctcctcagttgtatcctcggccatcgtggacaaatatatcggtgaatccgctcgactgatccgagagatgttcggatacgccaaggaacacgagccctgcattattttcatggacgagatcgatgccattggtggacgacgattctcagagggcacatccgcagatcgagaaattcagcggacgctcatggagttactgaaccagctggacggtttcgactacctaggaaagacaaagatcatcatggccaccaaccgacccgatacactagaccctgccctgctgcgtgcaggtcgtctggaccgcaagatcgagattcctctccccaatgaggttggccgtctggagatcttgaagatccacacaagcacagtccaacaggaaggagatatcgactttgagagtgtggtcaagatgagcgatggtcttaacggtgctgatctccgaaacgtggttactgaagcgtgagtgacaaatcttccttcataatatgcgtgtactcgttggctaactctttattagtggtctgttcgcgatcaaggattaccgtgacgctatcaaccaggatgacatgaacaaggctgtacggaaggtggccgaggcgaagaagctggagggcaagcttgagtatcagaagctgtaattgtatctaccttgcggggctggtggcccacatcatctggtgcacggtttagatctttgtcttgaagcgctaatgctatgcattcgacctattcttctattgttgattcaagtactccgtagatcaggggatcttaggaacaacaacttgcctaagtaacagttaaaaaagaagctacttcgagaaaaaatgaaggaccttgggttcgattggtagctcgatgccctgttcatttatgtactcattatatagctatgaggccggttacgcgtacaatgcgatatgatttgcggacccctagtgttgcctctccacttccccagcttccttcaacctgcccttgccacgttctcggttttcgcgccaatttcgtctcgaattagattgaaagcttgttgcgacacttggcgtttatctaccttagcattacccaggacacgcgggataaactccgcgctccgcatctccgcagagaaattctttacggacaacgaaaccaccaaacaaaactgtatcggtgcatgttggcttttagatccgagagaccagattgtctttgcgatcgacacttgttcattacaatcgcgccggaaagggttgtactccggtaagtgtgcaggtctggcccgaggggttagctcctcgtcccccaggctgaggatcaaacctgactaactgttgcaagatacgcgtgtatgaaccttgatatagaatcttaatcaacaccaaacaaggcgaatcctccgatagcacctctacctcctcctgctcactcccatgttgcgcactcggtaatcgcaagaccggcagacaagagaccagatcgaagagaacaatggcctaccagccatcgcgcagtcccttcgcgcccgcgcaacaagacggcttctacggaaaccctcgtagtgggctccgcggatacgggctgtcgaaccagcctatccccctgtccaataaagtgaacggctacttcgaaaaggaccgcacactacctttatacaaagataagccgttctttgcgccgcggcgcacgggtcctcgaaggagatggaagccgttcctcaacgtgctaggggtgtgtacagtcttattcttgttgtattataacttctaccttcgcacgtggtcagggctacagtcaaatgacaagggggccgaattatggaaatgggcccagacattagaggatgggaaatcttctggggacttgtctgactggactgcaagacgagagaaagtgcgggacgccttcatcgtcagttgggaaggatatgagaagaacgcatggggtaagtcatacagtatccttgtgtgctatgatagcagctgacaccattatccagggtacgatcagtatcgcccagtatcgaatgttaatcaggcagacacgagcggcgggctaggctggatgataattgactccctggacacattgatgatcatgaatctgacctccaaggtccaccgcgcgcggcaatggatctcaacatcgttgaattatgatcaggaccgtgatgttaatacgttcgagacgactatccgcatgctgggtggcttgctgtctgcgcactatctgtcaacccaatatcctgatttggcacccctcaacgacgatgatgtcggtgctgccggtgaagacttgtacattgagaaagcagctgatctcgccgagcggctaatcggggcttttgagtctccaagcggtatcccatggtcgaatgtcaatctcaacacgtcagaaggtgttgtcgtgcatttcgacgagggggctacgtctattgccgaggctggttcagtacaacttgaattcaagtatttggccaagctgaccggcgaggccgaatattggaaattggtcgaaagaacgatgaagctggttgacctacaaaagccacaggacggccttgtccgaaccgccatccatcctgacagcggtgcattcaaaggagacagcattagtctgggtagtaagactgattcttactacggtatgttgatagtacttggtgcccgtagttctttcaagctgactcgctctagaatatctcatcaagcaatacctgcagacctcagaacaggagcccgtctacaaggaaatgtgggatgaagcattgagaggcatccgcaagcacctagtctcattcaccaagaacgctcagctgatgattatcggcgaacggccccagggcctaggccaggaactgttacccagaatggaccacctagtctgcttcatgcctggcacaatcgcactcggtgcaacaggtggccagcccttatcccaagcccgaaagtcagcggattggactcaacagcgcgaggacgagatcctcatgtccagagaattaatgaagacctgctgggcaatgcaccaggccacggcaaccggcctcgcagccgagatctcccacttcgtcttagactcgccgcctgtgatgatggcagacaagtaccccgatccagtggcaaaccccaaccacgcatccaagcccgagatactgcgcggcatttcccagccactagaggcgcaaagcgatgggtccgagccctggcgtgcggacatcgacatccgccgcaacgaccgacacaatctacaacgcccggaaaccgtcgagtccctcttctatctctatcgtatcaccggcgacgacatctaccgccaatggggctgggagattttcaaatctttcatcaaacacacagccgtggttgaaaagaaaagtacctcctcgcgtattccgacatcaaccaagacagcacctgttttccgtatcaagggctttacgtcgcttggaaacgtggatgcagtcccttcatacaagcgcgataacatggagagctattggatggctgagacgcttaagtatttctatttgttgttctcggatcgggatttcatctcactggaggaccacgttttcaatactgaggcgcatccattcccgcggtttaagcctagtggggatctaaagacggggtgggagagagcgcctagaaagtagatttcgtgggcgctttgttctaatggagccttggttggctatgttttgatgtctcttatatgttccgtatagcgcttttttccgtgcttttcctttgccctctggggaaacctagatttgtataccaacatgctgtacatggccgatgttactttctgaaagcaatactccttgttcacattagcattttatatgtaaggtaaaatcacctctattctgctgggacttgaaataacccaatggcgggacctagtaaccgaaattatgtgaacatagctccagataccacacccctaccagatgatatacaactagaaatcaatcatacaaccacctcgcccttagcctctctttccagcgcagcctcaatcaactttttataaccaaccacagcctccttgatctggcggacagtcaaggcctcattatcaccatgagcaacaaagatacttccaggcccatacaagtagcgcttgacaccagggccgacagccaggttcggcacatcagtaccgtagttaacagtcgtaacatcaaatccatcaacatcaacatccaaatcctgcggcgggtaagactcgccatgcgaaacaaagtccacaacaacctccgcctcgaaaccccgaaccgcctcctcaacagcgcgctggataatctcacccgcctcagcaggcgttccagcggcaagtctcacagcaacatccgcccacgcctcagaaggaacgacattcgtcgcgacgccagcgcggataacgccaatattcagcgtcgtcggcccgtacttcggggaggcaggcaggccgccctcttcggtggggatatcgccgagcacgtcgacgcgcgagagcgcaggcagaatcgctgacacggcgctcttgcccagccacgggtatcctgagtgggcggcgctgccgtgcgcaaggaccttgaagccgagcatgcccttgtggccggcaacgagggctgcctcggttggctcgccgaagatgatggtgttgatggcgcttttcgcgttgaggcttgagtccgagaagagtttcatgccatcgccgccgatttcttcgccgaccacgaagagaaggccgagcttggcgtctggttgtgaggctagggtttcgagggttgcgaagatttgggctgcgacgctgccctttgcgtcaacggagccgcggcctgctatgatgaggttctctgggtcgaaggtggtggagtcggagatgggctggtgcacggagtatgggatgaagggtgggactgtgtcgatgtggcttgtgaggaggattgaggggggttgtgtgtaggatttaggaacagcgtagatgttgtagcgcgtcttggttttctcttggtccttcactgggggcacctcttgcttcaccacggtgaagttccgggcctccaggaactgcgcgacgaagaggccgacatcgtgctcgttaccggagagtgactcgatctcgaccaggtctcggtggaacgacagtagaggtgaactgctgattatatcatctaggcctgcttggctgtagctgggctgggaggaggatggcacgcccaggagttgttgctgaagtgcggggtgcggagaagcctggacgccggaaatgatggccgcagccgcgagatatgaagagagcttcattggaaggtcggggtacaaatatgttccaattgttaatttgctgtgtccaatgcaattgaacagcccctacgccctgaacgttgagtgttttgcgaagcttgtagatcggagatccgaggtcggccccgatgtatacggtcacgtggatagataaacatatcgaccggctcgtcctattggccacatattatcaggtctgtggtgctcgttattgcgtgatggattcaatgtcagatacaatgccagatacaatgccagatacaatgccagatgccttcattcacgtctatttcattcggcaaattcctaacccgacaacatatgtatagctcgtattcgttaggcgagctggcccacccagacgcgccgattaattcaagtcccgaagctctacaaatttagcagaacaccgagtggatattattggatattattggctgtccaagctttcctagaacaaggaaatcactttgattcgtgaaagtacatagcacagtctaacgctccgaagctaaattaattgtctccgatttaaacgggtagctcgtgttaatggatacactcgcgattcccgggtttaaaagtgatctccgtgcatattcacttcttataatcctatactagtgaaaccggcctcaccgaggctatgagcgtcattgggctcgatgctttcaaaagtactagaatagtgttggcacgacgatccaaaaacacagccctcggactacacatctcagccagccacatactacttctatgatcagccctacaactcagttgggttaacacatttcagctgggtatttttaaaacttaatacatacatattcggtttcgaacactaaccttagtgaataaagccgacaccgaaatcgtttgtacgcagagagaactacgtcgacgggcttcgcgaatcaaagctttacttttaacaggaccacaacgctcacccggtctatccgatcgtgtattgaaccaatttgccaaaggctgctagcttgtaatgtatagcgctattttattgggggaggaaggaatcacatatgtaccagctgaaaacgaagagaagtaaaagtggaccggatatagaacggaaatacccacctacccacccagggagggagccctatcgactcaagaagcttctaaatagattaccgaacaggtggaactcgttggtggaagcaattgaaccatcccccccctcccccctgcctggcatgcatggagaaccggaatctgctctagaaccacatacgcgctgaacccaggcgtagttggtgtcagataacagaggatagaataaataggtgtccagatagatattcattctagtttaattaatttgatggcgtttaggtgaaatctatatctcaaatccaacggctttggttgggtaaccatctcgcttattggatacgtttataagatctttagtacccagatatccacctcgtatagccctgtgtcgttatctacggagtactccgtatgttttatagaatcaatgttataccggggtatcttattgcgcacattcacgagggatatgagctggaaacctgcaatgatgtatgatcgacatgcaccatcacaacttggcatacttgaaaattgtgagttcagctcgttgttctgtattggacccacctgtcagtcagatattcacgttcccgatgaagcccggcactgatggcccgggagcgcggatgggttcgatcgttatgaagccaaaataaagcatactaatgctcggtaccgcgaatacgccccaggtggggatgagactaatgccataggagcaatgatctacgcgttcatgcttgtcacttcatatattatacatcgtatgtggtacatagtgacaataatgaacggtgattggcacatcggtgatatgtttccaggtgatataaatatggatgcccccttcagatgagtatttctaacacagcattcttactacgttagtttacttgcttcctgacatccgaatcattcatcctaagcaagaacatggaatcttttcggaaaagactgcttgcgacaacgatcgatgagcaggctgaaaccaaacccactcaacgatttgcagttatttcacagggattggacctcagcaatgggctccgagacatttcaatcaaagacctggcacaggccgtgaacttcatgtgttggtggattgagagcatcattggaccggcacactctgactccccagagacggtggcctatatggggggcaacgatgtgcgctatctcatcttctttcttgcatgccagaagactggatatcaggtaaggaaacatgccactcaaactgagaatagaacagccggactgactcttataggccttcttgccttctaccaggaactcagacgaagcgtatgttcatctactgagcgcgataaactgcacaaagttcttcttcggcgaggagcgtcaagaacgagtactggagatacagggacttgttccgaaattggacatcttccaggccccgaccctgaacacaatcctcagcgacgagagtggtctacgccactacccatataccaagtcctatgccgatgcagaggatgacattgtttgcatcatccatagctctggaacgacaggtaaatcccatgaacgtggcactgtgactatgaaccaagctaattcccgacaggcatgcccaagccggtgtatctcaccaacggcttcatcatgacctttgattctgtcacttaccttgaaaagccaccaggtcgccggccaaatacattccacgacctggatcaaagtcagctgctgctggccgcggcacctttcttccatctgatgggactagtaacattcatcttctcggtgtggaacgaatgtcccatgttcgttgcccccgataagccactctctgtcgactatatgatagagctgctgagcactggccaccccacagtcgcactcctgccaccctcggtcctggaagatatgagccaatccgagaaagcactagctagtttgaaagaagtcaaaaaagtgtatttcgccggcgcgcctctgcccctagagatcggcgagaaattgcgcaagtatacggagatcataacggtaattggaagcagtgaggccggcgtgatcccagggctaataccggaggacaaaaccaactggggctacttcgaatggaatgaagactacggagtggaaatgcaagacaccggcggcggcgtgttcgagttggtgattcctcggaagaaggattctcgcgactggaaggccgttttccacacatatcccgagctcgatgcgtatccaaccaacgatctcttcacccaacacccaacggacccacgtctgtggaagttctgcgggcgcaaggacgatgtgattgtcctcagcaatggcgaaaagtttaatcctatcgggatggagggtatcatcgagggacacccgctggttcggaaggcggtggtagtcggccagtcccggttccaggccggactgctcgtcgatccgagtcctgcgggatgggatatggacccgaaggtctttattgaggagatctggccggtagtacaggcggctaaccagaccatcgcggctcatggccgggtaatgaagaacaagatcaggctcgctatgaagacaaagccattccagacgactcctaagggtaacgtgcggcgccggatggtgcttcaggactacgaggaagagattgatataatatataccgaggacctcgtggatgacttggaccagtctctaccgcagacgttagaccatgagagtcttacggagtatatccgccaggttattacccgtgtcctggagaaacccgagatcgcagatgatcaggacttttacgctgccggtcttgattctctaatgaccattcatgcctctcggatactgcaaaagggcattcagctacgtcggccggatgtagaagcaggagccatcaacgcccagacaatctatggcagccccacagtcgaccgattgtctcaatccgtgatggacatcttagatggaagagcccaagctgatatcccgcgagcagagaagatcaagagtctgctggagaagtatacgtctgatcttccagtgcgggaagtctaccgcgagaatggattgccttcgccttcgactgtgattctaaccggttcaactggctcactgggtacttatctcctgcatgatctactaaacagcgattccatcaccaagatctactgcctcaatcgttcggatgccgaagcacgacagaagaaaggcttcgaagaaaaaggcttacacttcgacgaaaacgactggaaagacaaggtcgagttcctacaagtctcattcggagaaccacaattcggcctggacgagtccaagtaccaggaacttctcgactcggtcgacaccatcatccacaacgcctggaaagtcgacttcaaccactccgtcgattcgttcgagggcactcacatccggggtgtgcggcgctttatcgacttcagcttgaacagccgcaacaacgcccatgttcacttcgtctcctccatcagcacggtaggcgcttggacccccgacaagggagatctggtcccagaagtaccgatcgacgacatttcagtcgttctctcacagggctacggcgagtccaagcacattgccgagcgcatctgtctcgaggcatcgcaaagatctcaagtccccacgtcggtacatcgcgtcggacagatcgcgggaccgactagcgcgcgcggacagtggaatcgacaggaatggctgccgacgatcattgcgacgtcaaaagcgatgggtaaaatccccgaccaactcggctcggtcgcggtcgattgggtcccagtggtaagtcccccggaaattatgattcactagctcagccaagagaaaaaaattttaattttctaacttgattttaggacacactatccaatattatagtggaaattgtcaacacacgtcatcgggactcctccgaagcaagatctgccgtgtttcatctcaccaatcccgagcagacatcatggtcgacgttgatcccggcggtccagagcgagtatgcagtcgagccagttgcgttctcgaggtggcttggcgagctggagagtatcaccaatcccagcagtgaggaagttgcctccaagccggcactcaagctgctgggtttctaccgggggttggaaggcgagggcagtgccttgtctgtaccgctggatgtccagcggacgaaagcggcaagtgccagcatgagagcgctgggcgcggtctctccctcgttgatgcgaaactggctgcagcaatggcaattctgattaatatagcttatattggattatatctcgaattaatttatctcatgtccacggtgtatattgcttccaaggttatcgtaaggcttgaacatgacataagtcgtgactgtgcgcgaccggagcttcctcattgggtgattacctcagaaacccacccgattaggtttctttttcgcttggctgggtcggcttttgctatttgccgagcggctgtgattggtctgcagactcgggctatgccctttttgggctgcagggtggtctgttcggtgctagttctctgcagggatgccttagcgagcgatgcgatcggagagatctccaggggcaaaaagaagaacgaaaggatttgatatatcttgatctgtcaacagatatcgcaacaagcgacatgtcgcccgaagaatcaaaatcgacttatcgagcgtatcttcagggctgacaacctatctgtcgccctgaacaagcccgatcccccgatcgccgcgccaaggctcgcctcccaacccccaaaggcacacccggcgggcagaagcagtggcgccaaacaccatggttctcttcccttttccccttctcgcccctccaatcattgcaacatatgatatgatggaatgttccccgaattccccgagaacgttggttcgagccatgtggacctgacgtctgccaaaggggactttgcctttttctttctctttcccctacctctcccatggtacggccttgggtacctattcatattttgatgggattatgattggatgttctttcatctagtactacttgcggttgtatggaggtagtgctctgatgtctagtccaggtctagttcggagttcaagtttatcgtaggacggacagcaatatgatagtatacatcattccgtgccctagttatgtggtatataatttttcgaaccgataaccctccattgtgcgacccaactcgtcatactcggacaaagttctgacctccacgggacggggccttgtccgcggttgctcaacgttgtcggagctctacaacgtacatatacaactacaacatacaaacggggtggatgcaccagtccgtgcgtaggagtatacccggttattcgttgaaggataaccgagtacggagtaaacagacaagaatagctggagcggatgtatccaacaccttttccccccaatcctgcaaagcgaatcagcaccgatcgactgggtcgcaatggcatcataaatggttcccctcttgcatccacatcagtctagattgccgatcgcacacacagggattttggatggagtccggagtattcaattgagaaaagggtcctggaggaggggatgtagaacacattgggctacacggcatatctgtgtagccgttgggggtggtttgaaaaacaatcgaattagaagggatcgtacattgagtccttacgaagttacaacataacatgcatggataaatataaatctaaatatgaaaataaaaataaaagaataaagaatccttccagactctgctgctaccatggttcaagctgtgtcaaccaccggaactagacggagcgaaccttgggaaaagaccttttggatcggcaacggtcaatttgggtttagtcaccttttctttttttttcttttttttttttctttctttgggaatccgatggaattctccactgacagttgtttggtctagagccaacaacatcctctcgattcctatttccctttctcacatatctcctcttcatcttcatatattcatctctgtatccattccatatatccatcccatctgtcctgctctacaaaacaaagccagaaactgtacgacccaggatctccctgttcccttccccagtccgtttgccgatgtaagcaaaagcaccgaaacctctctttctgcccagccagttagtctcatcaacttgtttggtccacgtcgctcgggggaattcattttcgttttctttttcccttttctgtatttcgaatttctgtatttttggcagccctgcctggacgataatcgacatttccccgtcttcatcggatgctaactggtagaccctcagttcccgcgtttcccggactattactactactatctttccatcacaccgccacgtcctttcccgcccaaaaggccattgagggaatgacttgttcaaactgagcgttgtctctcttttatattgtggccacccctcgcatccaatgctgaacggcaacaaatccctatataccagccaccccgtccaagcggcgctcacctcgtgagaatgtacaaactgtctcaaattatcgacgcgacacgagaaagtctcgacgcgctcgaatcgcctctacgccagccgcactctccattgactattaatacctccgcgccggcctcgcctgctgtttctttgttctccgccgcaggccacaaccgggtctccagctcggtctcgtccttggtctcttcgtccggtctggggaactcaatggacagttccagtcggagtcagttgaccggagtcaaggaagaggattgcacacgcgactcattggaagatcattatttccgtatgtgcctatcgccaaaactcccccgatatgcagttgctaaccagaccttctatagaacactttgatcgcatgtctgcggcagattcatacttttctcccatcgataactcagatacctacgatctaagtgtcactggcatggagactgccccatcaccgaaaaagaggcgttccggctcagacactatgtcattaaagggcgtctcgcgcattaactcgcacatctcaaccatgtcagcccggtggaagactaagcgatcctccagtggtgatggcgatacgttcccggatgctctacggtctcgcgcgaactccgcggcctcctccgccttggcaagtcccaccactgggcctgtacctgtgagccgggtcgactctattcccccttctcccgcgcgaaccattttcgaggagcgcgcgagcgagtcgagcgtgcgcccaattgatatcacccgcgcgaacagtctcagccaggacgacaacgatgtgcagcaagcgacaacccctctcctgccaccatttatgagagacgacccaatgagcaatgcgtcccgcgtccagtcacctctgcagtctccgtcagtcgcagatgcgagtgaagcagcgtactataactataatgtgacctcggacccgcggtttatgggaaatcttccctccccaccactctcgtccaagccttctgtggcctccttcaaccggccacgagccagtaccgtgcgcacagtctcaggcgatgtaacgcccctcgtcctctccgatcccaatgatgaatgggccaacaaactcggccacgccaatttcactatcatgcctgagccttatgaacccgtagtttgtgacctcggccatttccagcagctgcggggagactgggacattgcgcgttgcaactttgccaagcaccttgtccgcactggcgaacactacggtatgacctcgaacatctataagctcaccattgataaatgggattcgatcaaccgcgagtgggcaaagcagcacgaggccatgctcgaccagctcagcgcgatagatggtgttgctctcacgctcacccattccaatatccacccttgccaacagctccgtatcccccgtctgcatgacaacgacaagttccccgagatgggggatgaggatattgtcggcccaatgactgtggcaccggctgcggagcttgcaggtccctgccgttctgagaaaaagagaagtttcttccgctttttccaggacttggtctcccgaccttgagacctgagtcttcgttaggctcttgtcttttgtctttttcatttccacattttcaagcgatccgcaacgataatgacgatagattattccccgcgcgcattctgactcgttcaatctcgcccgcactgttacgattaatgtctctcttttactcttttctttttattttttctgtaatgactctcatgactcacgatccggatcagcgactactgtctcgccccgcatcatgccattcttttgtctatattgcgagtcttgtcttttctgggggctatcttttcttctctttcttggtcctggatgtcttcctgcgtttccaccgaagacatccacttccttcaacagccgacaagaaagagaacgaaaagtgaacccctaactgactgggtgtgccacccttctccttgattttgtctccattacatactataccccccatacaccaagcctaccaaccgttgtaccccatagacttcaaccttactcatatctctgcttcacagcagaacaggacaaaaacgtgaaaagcatctgaaaaagtaccatacaatgtttctatatgtatatatccgtcttgatttctgcacaatacacatatgtttcatatacgaatgtcttattacatctgcatctaattctcaatgaacataatattatgaaaccctcatgtccatatcatttgaagggatgacacggtgcataatagaatcccacgtggaaaagacacttatcggatatgacctccaaggctactgttgcatgtgagtcacatggagaataaacacggtggagagaaagtgacctggtaactagttagagtggatcagccacgttgtgctcttaataataaagagaattcaccccgcgtcataccccgatgcctcgcttctggatgactcttccggtgagactaattttttcacggcgggtaagatattctcgccataaccgcggggttcagccctagtactatccgaagtaacaagttttcagtatcgaacttcgtaagaatttcaacttgatatacaattgaagcaattaatcaaagcgcggttctacaaccccctaaatagtgactctaactacatagcctagaccatgaaagaaaagaaaagcatacttgctactcctagttactccgtactcacgatattagactcgcctagactcggtcatgtcggtctgggctagtgttatcggcgctgcctcgtctccataaatcctttgtgagaatcctttgttgtacgtgagaatccttgcaaaaagttcttcgactcgttctaggaaggatccggttgctacctaagtacggagtacggagtactccggtggatagatgatagatagagactagatactccattgcctcgggtgtacctgcctcgctatctagagtcttattgctaagccatcttgtaatgatccgaataaaaaagtggcctcgggatgaagtaggattggaccggtgaggcaccctaggtacatacagcattgaattgggtcttgttcaattgccataaaaactagttatacaggcggcatagttagttagataatctaccagatcctcgctagttactcagtcaggatgtggtaacaagtgcgctcttaaccctaagtcttacaaaaaaacatcttgtgtccagcgggtagaaaaaaaaacagcaaaaaagtgagcactgagtgtggatcgaacacacgacaacctgatttgcaatcaggcattctaccactaaattaccagtgcgccagaaccctagaccgctaggctattggtcctgttttgtgatttgttttatggtttagggaaatataacatacatttcgtaatgctcaatgtatacaactagcatccggcttgtttttcaatgcgacagacagcttgtgcacaacatataattgtatgcaaatttctataattacatctataaatatctacaattctcatcatgaatataatctatgaaagaccatgtacgtgtcctgtcattagaaaccctggacgacacggtgcataatagaatcccccgcacgtgggagagacagtcggacatgaccactatttaccgaggcatagttcaagcggaaagcgcgctgcatatgagtcacatgtatgtatgtagaataactagttaacggtgcagggaaatggtttggtagagtggatcggccacgttgtgaagctaccgccatttgatcctctcgaacggctggattgggcctctgatactgataacaagtctgcatggtccaatccgtattgagagtgcctcggtttaatctttagttaggtcttgagattgtgagtcagagactctgtctttcagattcagattgcgtctggatccggtaactagagtgtatgtaattgattgtgtactgagtgcgataattggtcgcttactaccatgattacatgacgtatacctatgtatgtgttttatgcgccattctcgggatatatgtaggccatgtctgaggacatgcaagatattccaaatcgcattggatatccctccctcagcctcgggatccaggcagagctgagaatctcggatctaagattatcacagaaccgaaacatgcattgaggcagttgagatcaatattcgcgcatttgaggtccggtgaaactccgccaacagtaataggcctgtacacacgagctatgtttcagcttcggagcatgcagatagagagacaagattgggatgagcacggcgcagacagacgtaagcataaacccgggacttgaatatggcaagcggtaggcgtatataccagtctggtactttcaaacccagtactggccccagatgctctttgcctcttcgttgccatggaactggaactcgacggggatgatgtcgtcaaagccctcgtccagcgttggtgcgcggaagcggcggccgaagtcgccaaaggcgatgccgggaagggatgttcgggattcggggttctggttggaataagaatgggacaaggttagatggatattgccaatacataccagttctttgttggatgctcggacagcgttgttatgccgacataggtctggcgtcgagataaattgtacgcaacggatagggatgttgagctctttcgcgagagatgtccagtgagctcgcgtttctgggtcggcgttggtattatctagggtagtcgggttagatgtgggaaattgggaaactgagataaatgtcactacgtaccgactgccacggacttcttggcttccaaatactcgcgggcgaccttgaggcatttcggacgctgttgatcatcagcattagatttggtttcattttaggattagcttgaaaacgcaccgtcttgagaagatcttggttgactcgttcatagcctagaggctccaaatggttccagtagaaagtggactttccggcacctgggctgccacagaatattacaagctcgagtgggtgcttgcgagtaaagggtttggctgcgatgaagacctgtcaacactctaccagagttgggctggggataccaagttctttggaagaaagactgcacatacccggctcttcgagatctgactttacgaaagagatagggtcgaagcccaccgtcgccggctccgttatctgcccgaggaaaaactcctccggggtcttgaacggcataccgatgttggtagcaagtcccctagagcgagatcagactttgtcacaaaacaacggggtcatggttcttaccgatctacagctgaatgatcacctggtcttccagccgcatcaccgacgaaaaccgacgcgggcaggtcaacaccagcaacgtcgaaatcatagtcgtccaggaactcgcgccacatgccgagacggggtttccggtattcagggtctgtcgtggccgcgtagacgctgacagggaagtccagttcggtcatgacagcggtcattttttctttaaagttcgacagacttttggagtcactccgtccacccttgatatctttttggatactgatcttcttttggttggagaaaatcaccacttggaaactgtcgaagtatgagcaagtggactcataattaccgagtctgaacatacccttcagcgttgagctccttcagtcggcccgggactttggtgttccaccattgccaatcagtggcagatttggggaagacattacccgatttggttttgatcaaggtcgaatcctatatcaacgtcagtgggcctatctctcaacgctacccgttctagcgttcagttcaaccactgaccaagtcaaagccagcgattcggcgctgtttctcagcgggaggcactgtcttgcccgttgtctgctttccgatgataacactcgtgccgatgacgcgccatgtgatcggttcgggcttcttttgcgaggccggggtgaagaagtttgccgccgatttctctgtaggtcattttttagtagtagccagcatgctagtgggtagtaaagactcactggttaccgtcgagtcgaccttgcggcgcagtggtggtggagagatgccttggggggaggcgactcgcttgactgcgccctcggccattctgacagtacgggcgagtgaagacgtcgtgaaggtctatgggtaaatttagatgcgtgttggttgattcgatcagttctcgctgtgagatgcagttgaatccgagatatacgttggacgcgccgagacgcgggagaaatcacgaagtcacatgttctgaacttaaggtgagcatttaagttgtatgccaaatgtacgagatatatataacaaaaataaaaaatacatgaggacggtcatcttaaaagaagtgaacttggaatagctgatgatcccggaaaggaagaaagaatgtcaagcgctagaggaacatattttgacgtcgaatctggcaagatttatttgtaactttttttttggcttttgagataggacttgcacagattttcctgctaagccaagtcctactaggacagcagtacaggcgttgtatttctgtgggattataggattaggtatgcttctatatgcactcccaccgagaggaacgaaaatattcagtcgacttgattgctatgatgggtatatttttttccaataaaaacaagctcgagtctatcaacgccataccgtcgctggagaccgggtattcgtagtctccagcatgctcgcaaccgaaaggtggccatctacttcgcccgcgtatcaagagacaatcgatctgcctgctccaggacaaccgccgacttcaactgttcgcgcaggccaaagagatgctgcgaggcagtcttcatcgtctcctggttgctaccatcttggacaatgatataggcctgcagcacatagcttccgctcttctcgaacaaagtcatatccttcaaaggaggcagctgtcgccggggcaggttcgatccatccccacccggatagtgcagcacgcgatgcaagaagatagcaatgtcattatggatgaacatatcaccctcgaccacatactcagtagtgaaactagaaccagggttagagtccgcgatcatgagatcgattcgatgacgccactcacttataaccccacgcattcatagcctgcacgatatctccccgcggtagcgtggcgctcgacatcagacgcgacgtgaccgccgagcgggtgccagcttccgggatatcacgaaactccaacttccagggctgacgttcatagtcgtaggaagatgaagacacattaggctttgaatcgtccgtgccggccatctgggtgtctccatcgacgggggcagtggatccgaaatccgattcggaaaccggcccaaccacctgggtgtagtacatattcccgttgagcatcttgttcagccgttgcaggtccgcctgttgcaggtcctgactggctccggtgcgccccgccatacccggtttgcggtaggccttgaagatcagccgccgttctaggcaatggcggggttgcatggcagtcagcccggcaagttgctgcaggagctcatgatgttgatggactggaaccgaggcgaaaagcgactgctcgtgcattgtctgatatgtgtgtaatgtagcgggtgaagccgggagatgtccgtcagggtccaagctcctggtggcgcaacctaacgttatcaaagcgatcagactattttttatgtgttgcagctattgctaataatcatagcgtttacggggatgtttgctgtgtttgccgtgtttgccgtgtttgatctgtgatctgtgtgatttgatattccttagcagcacggagtactccgtagttcaatattggattctattgaattttccgatgcgtccatggtatgagggaatccgaattccggtgcgggcagggtccatggatgccccaaggccgccatccagtggcaatccgtgacttccttgtgcccaaggctgaaaggcaacagaaggcaaaagaaggaggagcccatggagagctcaccgagccaccgactgggaaatgaggggaagaggctcggaatctgcccccgaggccaataccgctgggatatggcgtgacctatatagtcttctccaataccccaggcccaggatgtaccgaagtagttcacccggtcccgaatcggctcctagttcttcttatcttctcgtcttttcccctctaaagctattaattctcaatatcaccttctcccatatattcagatctcgttcttaccgtcaaataactagaaactattcccttgttgggtgcctcgttgctctcggtcggattcggataccaccggacccggtcaatttcgcacattcccgcattaaattgatcttaccatcttcccacctcacactctaataactacataactgtcaaaatgcgtgccacttccatcctccgcagtgctgcccgcactcccctcattcactttattggcaagcgctccgtgccaagtacgtcaaatccttgtccgagctccaatcctgagaccaagctaacctcctcccagagtccattgaccactctcctcgtgttcaccccgcctctcccaccggctcgctccctgactctttcgccacctaccgtgctaaggctcagcagcacggtcccctcggtcgctcctccttcaacggcaccattggcggtcactccggtgcttccttgggccccgtcaagccccaggagggcgagttcttcgatcgcgccgagcttcccgcacgcttcggccgtctgccctggaccgaggccgagatcgaggccattgagaccggcggcgcgagcttgtttgcataagcgtcctctcgggcgaaataacaattgtctcaaaatgtatgaatggggcatacttccaatggaagttgcgtgacgggcgagcttgagtcttggatttggatttggggcagttgagcgcggtcacgatctgacttgggccggggcagccaataccttgataccttaccggtcgctaggacacggatctgacgcatgttcactcgttccgaggtttccgagaccagacactctcactttatactctgttccttgggtttgaagcccatctacaaggtcgtctttctctagcggtcattctttgccgctcttttctttcctttcggtgtttttgcactcgtacccggcgctggtggttgctttttctgggtgttctatttccatgcgcacatgcagctgtgtcgtcctgacgtcgaaaagcagagtcgcgttcgtcttatacataggttgtggtcaggacttggtgattcttgttacatacataggctctgtgagcactattcaaaatgtatttctcgactaagcttttcattagatgcataatactagaatatatacagccgaactatagtcttagcgtaagtatcaagggtagcaagtacgtggtctcaagcacgtgcctcccggctctacctcaattcgcccttgtagcccttgactactctcatcccgacgtctaatccaatatgggctctcatgtcagcgagacgaataggctgacattccgggagacagacgaggctggaaatcctactgcaacctatatctactcgggaggtgtcgcttcgatcacttcaacaccgacgggccgagtagatgtaatagtaagttatcatttcttgattcatattggttttctagcactggacgtttgaattgcacgcaaagttccagatatggtcgtcatcttgtggactggcgagcatcccggttgtcctggtatgcctaccaatcgctttataatgaatatgttcctggaacaacacatactctgttttgcatctatagtacatgaaatgtgctcattcaatctcgatttatggcattgattcaaaatatggatgtcactgcatgattcggaacctacaatgctatatcaatacctcaaagtcctcactgttgactaacctagtataacagagtgcctctccatcaacctcatcatggtcagctaagcctctattcagctccctgagtgatgtttttctcccttccggatatcctcaaagtgtcagcgatgactatctcccgtgagtacagcgttgagatatatgaaacatccctgatatataaacattgctaacttcagactagatatcaaatctttgtgagcatcaatccccggctgcaaactggttgtcacagacagaaccctcatggctcgaactactggctctaccatatcaagcaatatcaaagatacacctaggaaagagacctaacaccaatccaccaggactcccttcaagccttctgcagctcaatagcaggcctcctctcctccagagccgtcctccaaggtccatatcccacatccaactagaagacaagcaactaacatccaaccaaaatacaggagtcggcgtcggcaacgccaatgcctctccaacctccgccctactcctacacatcctgcaagatatatcaggccgcatcgcaacgatctgcttcgcccaccgcgtcggcacagccctcgagccggaatgcaaaacctaccgactagcagcagacgtctttaacgatatcgccatgatcctcgactgtctctcgccgggtgttcccgccggaccaccgcgagtgattgttctcagcacagctggtgtgcttagagctctctgcggtgtagccgggggtagctcgaaggcgagcttgagtgctcattttgctaaatgggggaatctggcggagcttaatgccgtatgtgccatttcagatttctgtgcactgtcttgttaggaaattgacagacagggctaacctatattttgtcgtgtagaaagactcgtctcaggagactgtcatttctcttttcggcatgctggtaagcatccatccctaacccaaagaatctgccctaacaaacccaggtcggatccgtagtaatctcccacataaccagcttcaccacaacctggctcctcctcctcatcctgctagccctgcatctaagcatgaactacgccgccgtgcgcgccgtgcaaatgacaagtctaaaccgccaacgcgcgaacatcgtcttctccgccctcctcgactcagacagcagtctagccctagccttagatcccaatcacaatgtcgaccctacggccacaactacaccagagaagaaaaacaccctcctcacactcacaccagcacaggtcgcccagcacgagcgcatcttccaccgagacggcgcattgcagtggacgcagcatacaacaacccagcacctaggatccgcgcagataggcgtgtctatgtctacattcctgggtaattccgggtcaggtaggacattcccacgcacgctcccgctgccgcaacttgtgactgttttcgcggatgagtattatatgctgtttcttgcaccgggagggaacccgaattcgaatacgaatgtaaccaaatggcatgcttcgattctcttgaagcggggctgtgcagtcgagcaccagttgaaggcgtgggcacatgcgttactggctgcaagggttctagctcaggtcgggatttcaacggagtcttcttctgttgatgcggttcttgctgttgtggagaagacgcttggcttgttgaatgtcgatgcacgattccagggatatatgatggcgttgaggggtgtggggtgggatattggtattgcggctttggagacgagggggggacggaggattgatatttgattatttacacttacttacatcttctatttcttctatccatacccggaactttggctttcattcagccttcaacctttatcccattctacactcgatcctatcctataactacatatggtaaatgcaatgaaagccaccctccgcagtgccgaacagacatcccattaacttcgaaaggcagcggagggttacgtgtgcatctgtgctacaacactagaagccgatctgtacgtctccccgggctctcgctttcggccgacatgtctgggtgtaggtgtctgacgtgtgtgacgagaatgatcgagagaggtctagacaagacggttggtttcggagttgaggggggatactcggatgcctgctgggaggacgggtggtgtgatttgattccaaggtgtttagttaaattgaaacatgtgttcagaatggaagagtcgaagtcttggttaattgctgggtttggaattgccctgacggttggatgcatggcctatatatgtatgtgtatgtgcatatctgcatgcgaattcaacgctacggaggacagacactggagtacatgatatacttttgtatggtttcactgtttgaaaagtaatgcgaggaggggtatcaagtctattgattccgaatagaataaaatcccaattttgggagatgagagaccaagacatgtctcgaccaaaacgccgtgtgtccagaggacctgaaaagccaccaggtcctctatccaatctatagatgagagtatgatatgatatatatgggtttcttttcccgatgccaaccgccaaaaaaccatgaaaaaaagtgacaagtgaaaatgaaaatggaaagaggatgctcagccggagacatcccaaaagaaaagaaaaaaaataaagaaaacgccggtttcatatgctttcaatgcgtcatgctctcatacaccgccaatataaacgctcgacaaaggctagaatgaagtcgtgggatgatgcatttcatgcaagtgtgtaatgatgagaagagtcgttgcgaggttcgtagttgtcgtaagtccggagacaaaagggtgtgttttgggatctcgacaagagtcgggatcaaagggagaaaagagaagacaattaatcgtcaagaccaagaatcttaggatcgcgattgctaccgttgctgcctgtagtggagcgcttcttgaagccaagcttcatacccatcttcttccaagggttctcggtgcgaagcttaggactgtgcatgggaagatgcggctcgctggcaggcggtgtggtgggcggcgtcattggctcctcagcggtggggctagagctggagtcatcggtcagcgacaggtaagctgactccccgctggtgcttccaagggcgccggaggtgcgttttccgagggcatgcatggcgccgagggacatggtcgagcggttgtgacccgttgcaggaagatccttggtagacgactgcggggaggtgcgcttcgacacgcgcgaccggactgttttgatcgggtgctcgtctaggctcgtcgatgatagactcatgaagtcatcgggccccacaaagggatcggaaggacccatggagggggaagtggtgtggctgttgacgaaggggaggaagatggactcctccatcaggtcgtggatgcgcttcacggcggaatctaacgtctcgggcacgggcggcgcggtcacattcttgtactgtaggagcgcatcgcggacttcgctcgacaggttgatctcgcgcggcgacccggggaagatgtatgcagacaataggcgtttccagagcattcgcaggtgctgattctcggggcagtccgattccaaggcggcagggcccagtcgtccggccagagcgtagtaggaatcccggtagcggttggcctccatggtgaattccaatgtttcgagacagtgattctgggagaggtaggccatgaaggcgctcaaggtgtatggaggaggagcaacgttggccagcacctcgttgagcgtcgggcgcatggagaaggcccccgacgagatggctaggctgaccggccgggagccagaagattccatatcctcttcggagtcgctgtctgaggaggtgggggacaattcgggggttgcggtaggagtatggttccgaaagaagagagacggagccagcgtcttctttttaagcatagcgtagagtgtgcgtcggggacctttgatcggcttttttctcaccggtcgtcccctgcgtgtgggacgaggctccagcttgagatgaaagagggttatcgggatacaggcatataggatgcgcaacacgggatgacaggaatgtagggaacgtagggaatgaggtagagtgagtcgggtgcgtatagtttggagaggcaatataaaaggtaaataatagaaagtggaaaaagagaagcggaaatcacagcactaaagaagaagaataaaaaggtgcaaagggcggattctcgaatcattattcatgacgataccttgggtaatggtaacggggccaccctcagtagacttaagtggggcctatgggggacgctaaactagtttctgcgcccaagtgggggccggtggagtcgtctttcgataagatgtcattattatttttcttttttcttttctttttccgtttttttcctgtctatttcttcattcggtttatttcggtcttttcgcgtcgtggaatttcctgattggctctggctctgtcttattgtggcaacacactgaactctcacgtttgaacaagcgcctaagatctgcaagggagacctctgaaatgtacggaggagacaatcttctgtcgcgattgaaatcgaagcacacgatccaccgatgtattatgtaactccatgtcggtccatcactccacattccttccagaagtcatacgtgtaagcttccacgggttctggaaagcgaacgcgcccaacgtggcgactttgaattttcgttcccctgaactccaccaacacgagctctttgaagatacactccatccgacggagtaccccgtacaatgcatgtccatcttctatgccggatgaggatataactcctacatctactgcctaattgacgatagcctcttatctcccggacgctagcacgccatccgagaccggaatgtcaatcctgacccacggttctgtggtaaagaatgaccgtaccatgacgggtaaaatacacgataaggccgtgtgtcacggcattccctccttgcatcgaaggtcctcaactcttccaaggttggcgttcccgggctggcgtaaggttcccaggtctggcacgtcatctaaaccgtaattaaccgaatgtattgtatcaaatcatgtacatttaagttaacatggccctgccgatcattccaaacccggttctgagggagatcatctgtaactcacactggaatgtcacacaagctctgaactttgtctctcgatcattactagatgcatgctcggggctcgtggacgcgtatgtggaattcacagggatccggcaaggtacagatgaaagaaatagattggcttatttggtggaggcaaaagagcgacccgagcgaccgtggaataaggaataacgaataaatagcgaattcaatgccatgctcctctgctatatcgtacaatatcaaattcaactgcttaactatatccttaaccgaaataacctgactgcagccgaacctgcccagaccttctagaattctagaaaccccgtcgaagcactctagttccttcaatccactcgatcgccacatccgatattaattcattctctcagcccctgaacggactcaagttccacacccagtcacccgtagcatcagagttttctttgtagatccgggtatcgccactatcatgttctgtttgtccgagtctgcccacatagcaatatcgaatacaacatacgcattttatgcatgccaagccaggtgtaagtcaccgttgacatggagatcgttgcgacccacatcctattccttttttcccgacaatgttcggccgaaattatgggcgcataccgtgatactacggagtacggagtatggcacatcgtggtactgccgattcaaaccgagcgccaagactgggagagatctgtctatagatccactttttgtctttcactgagaacatggaggaatgtagtataaattatagcaagtacgcgagttgacatcaattgtgtcagatcagtctgcacgctctggataaggttgccgttgaatagctcaatgaagcttggttctacattaggatttgacaggtcgaaacatccatgtgtgcgtctgcatgcaggatatagaagtgttgagtttcatggattaaaccaattgggtaaagacgggtattacttgctattacttgccattgagttcatctcaggtccacactaatagggtatcattgagcttatggtcggatagcatactagtcaatattttgctttatgcaagggcacagaccgtttgaaaaaccgtcaaatggcatagaacatacaatagaacacctacagcgtgcagatatagtagtactcggtcctacattgtaatgcaatgcgaaaatcaaaaagcaaaaagcaaaagcgctggaccaacagcacgtcaaccccagtactaagtagcaccagcgacataacccagcacgccattattaccgcagccactcttcaaaaccaaccaaatcccaaacctaagcgcctagcaaagacagaccaagttagacccgactcggagcgggcctcctacgcctatatcgcagcgaaaccgcaagcccgtattgtattaagcagggactagcatacaagcgatgcacgcgagatccactcacaagaggagctcaaagccccaataatcgatcttttcttggccaagtacggaggacctaaacaggaaggaagcggatatccaccattcttccttcccccaatgttctgagagattaaggacaatacccccccacatcggtgcccacgtgattccgttacgcccttaccgtggccgcgctggccatgttcttaccttttggtttcccaaatgcgtctagaacaatggtcttgcgttagcgaggtggatcttggatttattttcttctcattgctatgtttatgttatgttatacgtatggggtgcatttccattctaatattagggcactactgtaggtgctgatggggaattattttgcagggagtgagacttttcctctttctgttctttcgtattcttcccttttttctcgtttgtgtatatatgaggtatttactccgattccttagggtaatagaggacagattgtggcatatatattccaatggcatatatctgcatatcttcaaggattatcaccggatattgtttgtatggggtaatgcctagacatggccgtttttcgtcactaaccagaaggcaggggtgttgtcgctattgactcgtgcataagctacattagtacctgcatgatccttgacgataatatctattgatcatccttggtgtcttgcctagtttgctatacccaaggatctgactattagtcgatagtaaccagttatttactcaccaagttacctttatatatttgcaattgtgtgatgcgattgtgtaacaattgatgcaatatccacggtgtacaaaatagtaaaagcgttgataagccaagctcgaactaaacacgggtcaagcaaggagagacataatcaagcaacacgccccggatctacccctgaaaccttcgacgctagcctgtaatatctctgtatggtgtgatgatgtgatgatgacaaaaaagtaccacggaccgttgagccagtcgcaaggaagaatgtcgcaaccaagaagattgccgatccgcacgggatgatctctccagaagagaagaaacacgcaaccctgttcagcagtggaccctttagctaactaaaatacaagggaaattgacccggccacccacagcagtcgatcagacggcagatgccgccgtgacctcatgtttccccactgtttcactgtaatcttgattttagccaaacaacataagttgtatgataatatagcactagattagcagaacgatcgagactctaggctcgtttcaggcccttggctagaaggtactcgcccccggcgctacgtgaaacctatgagacactctgatattgttagtgtcagggtaatttatcgttacgagggctcagactgtggggaatgcatgcgactaactcgttctagactggccttatcaccgtcggcgctaaatattggttttgctttttgggatggcttaagggttagttacgttgcttgtatgcactccggtctccggagtttacaaagtgcgtttcatactacgcgcctggtttggccaagacaccatgtgttagcccatttaagggtctatagttagattttgtggctatcgtcaaactccgtatagaatatcaggatggtgttatgggcaaggcgatcccgtacaaacattttcaatatcacacgcagggaccaatagccccaatacccatgtatattatagcataatgataacataattgaaaccctgataccataccacacacatatgtactccggatacgagagtacagagcccaaaagataaccccctgtcgataaaagcccaagcccaagctcaaactcaagctcagctccaaaccaataacagcaaacctcaccagcccagcacccaatccgcagcagaaccagcccatccccgcagaacccccctccgcctatccacgcacacccatggaccgcaaaaagcaaaaccgcaaaaaagaaaagaagacagactcctctagtttcggccacgccaagaccaaatcgccaagcggggaaggagataaatgcgggggaatacgccattagcacacaccctaagaataatgctaactaacgtcaactagttagttagttagttgactaaaaaaccccattacgcatcctgaggtaacatggcacaatatcgagtatacccactgctccgctctgactggctgccttgtccggggggattctgagctgctctgcacggcggaccgaatacagtccagttcccgcctgagcggggttggtgtttgatctcattgctaggcgcgattgggtatggattgggatcggatcctgttggaccctgtcgatgcttctagatcttggctgggttgcgtggctggtgcatgtccgtattgcgggttgtcattggtgggctgggactgcgcctttaataacgacttctgggtttgctgtgtggtgatctttggtctgattggttctggctcatgtgtgtgagggagacgtgtgtgtccatggactggtgtgtgggcaaaggcttgcttattggatggtgcggcgtgccatgggtatactttaggttgggttgagggatgcgtacgagtttctgtttctgtgatactttccacatgatactttaaagttatgtctctgcagagtctggggatgatgatcaatgatcgacggttgttgacaacctgcaacgtacgttgtagtcgtacttcgtggtttggttggaatcatatgattatttgacacattcttgctaggctcaagatggagatgccggggattggggttgcttgcttgtcatttcccatgcacatgttctgcacggctgaatggggtaaacggctgtcgttgagacatactactttgagcatatggggagatgtcatatccccgctgtactccaccccggcgaagaaggttaccctgttgggtgatctacgtcatgccatgacatgccacggactggtgatccttgcattagcgtgtcaggtaaagctgcagaatggctacaacatacggggtagtgtggctgcacgcaatattcacatgttgtcagttggtatcagtcggaagcttgtgattgtcgatcgagtagagaagtggcgaaacgaagatgtgaacagaggaccaatagcattgaaaaggctgaatgtaaccgttggatgtacatagctactagaaggtacatacttccaatcagtcttaggctgtacctgattcgggtacagtgatatgttttctaaaactagcaagcaattgacaaggccttctaccttcactcccggctgttctggatgaatatatttatctaacccgcggtgtcaacatggtatgaccaagagggtagttagttgatttaacacacaaggctatctagtgtatgtccgtagaataatgataaactgatttcatttctataggcagtcctccaccaaaccaacaaatacaaagcaactattgagaccagaccaaagagataagaatgcaagctcctattacaagaattgtttatatacgtcgtacgaataaatggaaaagacttgtaagaacaaccaaatgaaaaaaaaagaagaatgctatcttaatgcctaccagtaacaaaaactcgcttctgaaacagagcaagaaaagagaaaaacaacaaaagacaattatagacatggacaatagatctttggaacaatcaaaagggcagagcagacggttgacaggaagagaaaaaggaaaaggggaaggggatatatgcaacatgctcttccagcttctgcacgcaataatgaagaccacgcagtggaaaggattttttccccccggatgcacaggatgagaggagataacaagaatgacaagaccatggtagacgggccggagaaaaagcacacagagagaaacgagagttgcctggtgtgcttgtccagtcgatgaacaggaatgagaccgagagataccagagacacgcccaagatcaatcgattcggattgttatctctcggaactcggttcatcctcagggcggattgtgtcattgagccatgccaattcttgtgcgggggttgaaaccattgatccaagttgtttgtctcccgagccagcgcaagaaacaaggtccgagggcggcacgccgcgagtcaatggcatcggaggatcaaccgatgagtacctgcccatttgaaagaccaatggttgatattaaacggtgcacgccggatatagtgacgagacaaggaagcgaaatcgaaaacaaaagacaaaactctcacaagttcgccgttccgagtcgtagcaccatgaaagagtgatgagacgtaacatcaatgagagaaaggttgttcctacccacagtcaaatgtataggctgaaggatcgaatgggacaaaaagagtatggccggaaggtgatttaggccgagaagcacatttcttgctcggcgaagcggcgctaaccacttgaacacaagacaagaaagagcgagaggtgaagtaaacaagaaaagaaaagaaaaaaaaagaaatcccatgcagaccttcttaggccattttctgacatgaagggcaggaagcaggtgaaagcgtggcgcggtacgtctaaatgcgccatcacttcatttggaattcaacctggatcctaagatgagctgggcgctcaagtgatgcagtacagctgaatcacctaccgcagcacagagccttcatcaacttctgcgagaaagtgggtgtcgattcaggggtacctggggcaccaaggggctgttggttactcagccccgggttccctggactcccgttgcgaccggagaggtgggcattggaattttgaaactgagcctgggttgacgcagctggagtcgatgattccacccccgcgctctggcgtttgggaggaatggcgccgccggcgcttggtcgctcgcgcgtctttccagctccaactttggctggagaaggaggcgggggctgcgcggcgtttaaacggtcggctgtcactcctggacgttggctgctgcggagctctctggcatgcgggtcgcgagcagtcgagctctggtgctggttgtggagatgtgactggtttgggtaggacttatagtcccagccccgtccgttgttgagcttcatccagtcgtactcgccatcctccacctcgccggcgttcttgagagcttgtgtcaagatatcacgcagataatcgtagtcaggggtgtcctcgaaaccaaggttacggacgtagctgaggtacttgttgaattcttctgacagagtggttagtagatggttacgggtaatagtgataataacatacctggataaccatcgcagaggtccttgattgccgtcgtttgcttcttctcgccaatcttctcgtacttctgcttgttggtagcagccttcaggccctgccagggaaggccacccctcaagaaatacatgaagacatggccaagagcttccaagtcatcacgccgagattgctcacgccccagatgcgtgttgatactcatgtaacgagcagtgccagacaaggatttacgctcgcggtaaggaatgtgttgcttggtcttgggatcacggtattgcttagccataccgaaatcaaccacgtggataacattggcagccttcgttgatggccggccaataaggaagttgtctggtttgatgtctcggtagatgaggttcttctcgtgaattgtttgaacgcgcgaaagctagtgaaagttagtcacggttcatgtagttttgatcagggaaaacgcaccatctgcttggctaccatcacaacagtctttgtggtgaagcggcggttgcaatgatcgaagagatcctccagagaaggaccgagaagatcgataacgaggatgttgtgcagaccctcttgtccgaaatagtagacattgggaatgccagctgacatgaagttagaagaccgtacaccatcttattccttaggaatacttacggcatccaaccagaatcttatatgtccggtactcatcgcggagctggggagcatcgcttttccggggttcctaattgggtcagccaggaggctcgccggccaaggggaaagggtgcgatacgaatttgatggcgacctgctggttgttcaggaggttggtgccctcgaaaatgacaccaaaggagccttcaccgatcttcttgcccacacggtagtggacacccactacgtttgacgatgaggatgccatggtttcgggagtaagaattgtcacccgcgggaataaaactttggatcacggggaatggcttcagggacgtagacacgtgattgatactatgactgggcgcagttagcacaggaagtcgggtgatgaaagcaatatcaaggtttccagtcacatacatcagtaacctctattttttttttccgaccgaagcagctctaacaggctcaatggagtctattcgtcaaatagccgatgtaccggggacggcgatgaaaggagacagggcggcagacggaatgcacgatcgggacgagaccaaagggacggagggacgtctaaagccgaaatagcccaatacaagcggaattggcagtgctgagcagtaaatgaggcgttcgtgggtccttttttgacggtcggaagtgacgagctggggttgaagccgggagaggtggtagacaagccaaagaaaaggggaaaaaaggggaaaacaaaacacagagggcacttcgacctactgcgagtacggaccgcactgagcagtggtttcaaagatataccagaggacctgagaagggagaagatggagaagaagagaaagagaaggtgcaacactctaggagagagacagggagcggagggtattgggttcgtattggtaaaagacgccctggaggggaaggggggttagtcgcaggaaccgctggtcacgagaatacagtgactgtatggtaactttggggatgggaaaccttctctgagacctatcagaggtcgtcgtcttcattgttctctataactaactagcagttacatatagactcttattaaggcttacgcttgttcgaagaaagccaccaaattgcctaactcttgaatattcccatctcgtacctaccctctcccgagtctcggcgcttccgaagcggctcaatctccagggctgcattaaccaggcaccggaaataacagggaaattatatacatagtatcggctacgacatgcattttgtctcaagaaagaagttataaccggggcagcatagacaggccgattcaagttttctcatttcaggggagagctcccgtctggaggttaatcaggcggtaatattaccgtcttggcaggaacccggcctcccagttcgtcgatcactatgatctgtgtccacgtctctagccctagatatgacatgtccactagatagcccgataaaatcacaagttcatgcaatctaatgctagtatcgttacattatagcagataccgcgataaacggctccatattgattggactagtggtcttcgggaatgtcctcggcttcgctcccaagttcattctcaaccatgtcctcatcactgtcctggccggcatcttcatcgtcctcatcgtcctcatcatcttcactgctggacccgctgccttcactatcgtcactttcggggttgtagtcttcctcctcttcctcctcttggtcttcaagctcccgctgagctttctggagctcactttcatcttcaccggctgcctccgcggcgggggcgnnnnnnnnnnnnnnnnnnnnnnnnnnnnnnnnnnnnnnnnnnnnnnnnnnnnnnnnnnnnnnnnnnnnnnnnnnnnnnnnnnnnnnnnnnnnnnnnnnnnnnnnnnnnnnnnnnnnnnnnnnnnnnnnnnnnnnnnnnnnnnnnnncccggggggggccccgccgcatcctctccgccggctttattcacattgtagaccttggcgcgccgtgcctctgcgagactagcatcttggagaccatgtcgtttgatgtaagtatcgattccggagaaattatcctggtcaatcatcgagaactcgaattcctggacgtcttcctcggagccattctccgggcgagccatgacattgagattgaatgtccgctggaggacggatgtatacgaaacagagtcaacagttgcaaatgagaagaacaggagcggtttcttgaatgcaaataagataccggtagaaagaaggaagagatagcctggcgcaagccaaagtatgttagaattatcgagataaaactagaagcacaatggcttccagtcagatggaaatatgaatgcaacataccttctttactaccgcggaatgctttgacatggtatgctttctcgcccttccggtgcgcctcaggcatggcactgacaaactgtttatcatcagggcgcacaacacgggtgtgagccatgttctcatccaaaattttgcgaataaatgcctcggccgattcaccgggaccttggccaagctgcttcccatctcctgagaatgctgccttggctggtccatcggctatcgtaaacaccatagcttcggaggtcgctgttccctcgggcgggggtgtgattccatcggcgtactcggggatgatacaaaaattgaactgtttttgtgtcttctcgggcacaggaagacagagggcatgtcctaattcgtaacagatcatgttagcaactcaaaagttttcttgaccaagtaaactcaaactcacgaattttatccatagaaacaccgaattcaatctccttcgtagcttggttccttgcccgaagatactgatgtccagcagtgacctcgagcgtaagcttcttcctctgcggcgtagagaacgaaacatcttgaacataaaaaagaagtggcgcattgccatctttcaggttgactgacgcctgcgcagtctcccccgagtctccattttgaagctttcgctttttagcggcaggccccccccccgcccggnnnnnnnnnnnnnnnnnnnnnnnnnnnnnnnnnnnnnnnnnnnnnnnnnnnnnnnnnnnnnnnnnnnnnnnnnnnnnnnnnnnnnnnnnnnnnnnnnnnnnnnnnnnnnnnnnnnnnnnnnnnnnnnnnnnnnnnnnnnnnnnnnnnnnnnnnnnnnnnnnnnnnnnnnnnnnnnnnnnnnnnnnnnnnnnnnnnnnnnnnnnnnnnnnnnnnnnnnnnnnnnnnnnnnnnnnnnnnnnnnnnnnnnnnnnnnnnnnnnnnnnnnnnnnnnnnnnnnnnnnnnnnnnnnnnnnnnnnnnnnnnnnnnnnnnnnnnnnnnnnnnnnnnnnnnnnnnnnnnnnnnnnnnnnnnnnnnnnnnnnnnnnnnnnnnnnnnnnnnnnnnnnnnnnnnnnnnnnnnnnnnnnnnnnnnnnnnnnnnnnnnnnnnnnnnnnnnnnnnnnnnnnnnnnnnnnnnnnnnnnnnnnnnnnnnnnnnnnnnnnnnnnnnnnnnnnnnnnnnnnnnnnnnnnnnnngggcgggtgggggccgcgaagggagggtggtgttggtcctggccagcaggctggaagtatatttcgcaagatcttcgaacagaggtttatgctgcggtgttgtgcctaaacgagaaaacccattggcgacggtcagcaggaggtcgacgaggttatcgaagggggacgtgggtgcgttgttggctacgcaccgatcgcatcgtagactcgctttttcagcaagggttccgtcgcaaatgcctcctcgatggcggcgatgggcgcgcccgaagaattaatggaggcgaatgccatgtctctttgcgactgctttggttcaacagaacagcagtgcagggagatgcaggttagtcggagatttgggggatgaaagcaagggtggacccgaagtatccgcattgattggaaccctaacttggggatcatgtacggagtatggatatctccatactgtatgaattcaagacacaaatccgaattaacttcatcaagaaatagatatatgagtgaatgcaaagcttcatactagaatacagtggtgtgtgtacacaatgctacaggaaaaaaactccctccgccgacttccatctccttcgcccaatcaagcagcctgcttgggctttgacttctttgtctttgttggcttctggagacgtgcgttttggagatgcttgttaatgaagtcaatagcagccggtgtcaacgccccattcccgttggcatccaacttcgccttcctcgcttccgcaatttgagcaatcttcatgttcttgacatctgtctgcggtgtcatcatagagacggtttttctgtattccttgcgatagtcctccttcatcttctctctcaggtattccggatcgtgtcgagtgcggaatctggagtatttgttgcgcagctcatcaatgacggttgtaggcatgggcgggtgctccagtgtcggtatgaatgtgctggcttcaaccgccattcgcgttgtatccatgtcgccgtcggtgatgacaggctcttcctccaacggccaagggatttcgacgtccaagccggagatatagcgagtgaatcttgggagcttgctgtgttcgggtcgctcggtgtacggcccagcagcataagcgtgctgaacaatgacgttctgcatctttccagtctgtgtgtcttccagcggaatgacatgtcgaatgtcgtccatagacacggggaaggactgtggttgggtatcacctgcttgtcccattctgtctttggcccattcgggaatgatcacgtcggcctgattgaaaaaacatcagtgagcatttgtttaatcaagaggtcattgacttgtatggctggtccgccggagacataacataccacgttgatacccttgatgaggacagtctcactctcccggttgacctgctgaatgacattgatctttccctgatcccgtcctcggataacgcagacccggtcaccttcggcgaagaggacatgtctccgttgttcgtgcttagggagacgcggtgggtgcaaaacggaggcatcctgaccaccatatgtggtacgttgtagaccagagtctcgcatgggggcaagaggccccttttcccaatcttcccagcggttctttcgtgcttcttggaattggccagacagcgcgccgccgaagtccttccgcgcccgccgaatcccaacacggtctaacaattcctgtcgttcatgagctttgtgagtttttttgagagcctgcttccgggccgtagctgtccgctggataactctctgcatattgggtgttgtggtccagcaatggccgaacgttgtctctgcctcaagaatccccaattcgcggatcgaaaattgagggtgtccgatgagccacgtgatcttgcagttaagggtaatgtgtattatgtcagcaaccggttggcagcctgaaacattcaagtagttataccgagaccagctgtcattgattctcacaatactttattattcttattgtattgctctatatttgagaaggaaaataccccatggaaagtgacaatgaaggctgcgaacgattgacaggcctcaacaacgccaacaaatacacgaaaaagccaatgtattcctacaagcagctttccgtaacagctgactaaattcgagggccacaacccacatggaaaccacaccgaggtggatggtatctaaagatattcgggcaatctcatgattgaaggtttatatccgaggattcggggattactgatggccattagacacatagagtcatccgtgctttggaccttctaattctccgtacacgtcctttcccagcatttagtttccgaatgccgtcagaggaacgcacttgtcttcttcggacaatcaagaagcaccggcataggttatgagatacgtatcgacgccgattcaatgtggttgagactattcttggacgtcgcttcattatgaagctctaagagaccctagaagagaaataccggcgcgacatcgtagccttaggtgtgatatcacgcaaaacttaagaagccaatgagatgccgaaggcgagcccgaagataaaaacaatgcctttccgattcttgttgggcgcaagacaagtcgggtcaaaaagtacataagcaccggccacggccccggggtatcaagatgttgtgatcaacgaagtggattgaaaggtccctttcatgagcagcatttgctcatgcataaggtctgggtgtgctcaactttgcctttagtccagatttgggttgggacgaggaaggaaggaaatctgtcacaacgtcggattgtatctgagatcgatcgtgaagtcccatacaacgcccattgaaattggcacacggatccatttttggcggcaaatgaaccaacactgataaatattctaaatatgtagcttctgtcggcacgctaaagcattctcatttacctcggaagaattatgctctcctatttttgggttcccgaaaaacaacttaacggcttgtggcttgtgggcgcaagctccaggatttggcccctgtctactatttttagcctgcgcaacacgatcattggagctggcaatatatcaactccactttcaaaacagcgtcaagaatgttgtaagccatgtaaactcagaagcaagcgaaggggcagaggtttgatggtgtggtggaatatcggaaattccatggtacaattaccccaatggtttgacgacacattcaattttgggacccccctggatgcagtagcaaatgaaacaaggtttgccagcagatagcataagatcgttggaaacctccacctacaacgtagtcagtacatgccgagagctcccggggagcagatcagcaccagaagcaactgagatgcagggaactatcggagcgatcttcactggccgagtcaagcatttggtactcctgtaggcctggaggcagccgtgtaggagcactgcccgtggaagtaaatcccggtagggtgatacattatatgtgagatccgaggacgtggagctaagaaattgccgtagtagcccttcatttttttatgcggtgtatgctgctgcatatctccataaatgtaggtttttaggagatgattgaacgaatggacaaagttgggttgcttctcaagctccgaggagaagacatgagccactgaagcagtacgagtgaaatttatacgccgtagtcaatacaccataagaggactgatatcacattttgctcatatcagataccataacagccacgggtggctgtgctgcctgtggttgtaagcaacaaagcgcgaccaagtgggccgcgtgatgtggacggttggacctcagccacacatatttatggctgtgtacctattaagttcgcttttctcttttctcaacctcggaaaaggggagagcccataagccacagcatataaaaaaaggcagcctgaaactcagggggtacacttgggtgtgtgttcatagagtgttggcatgatacatagtactatgtatgtgtatgtacatgtacgagtacgccgtaaaggcaacgtactcatgtaccaatgcagaccgatattaaaagccgtacaacgtatgaagtcccgaagcagtaccattaagatagtcatcggcgcaagttgatacctcatctagaccttgacacgaagcatctccagggggaaagccacaataccgatacaccaactggcaacaacaaataccgtatactgccaccgccccccgttgtctagcctggtcttctatctttctctcctccacctccaaatcatcattccatcgtcttttttccatcgcttcccatcggaaatacctcgtccatctttctaatttccctagagctattgctgctggcactagctgatttactgcattaaatctactactccgttgcgcctttgaacactgtatgggatcacccttttccttttcccccctcctcgggagcctggcttcgccctttcttctggatcgtctgttccctgtgacgccctcgtgcctgtagaaactcttgaatcttgaaaatctaggacttgcggggctccctactccctcctgcttatttgcccctatactgacttgttccttatcaagatggccgagatccgtcgcaagctcgtcatcgtcggcgatggtgcctgcggtaagacctgtctgctcatgtgagtactgaaagtggctctctcatcgaggtcgcttccctaaccctccgcgtttactctttcgttcggccgcctgactgaagttcgcagtgttttctccaagggcactttccccgaggtaagttccccccgattcccgaaagcatgttcctttctcctaggaatatactccggagaagcataattcatgaaggatcatctgactttgtttccgtcaggtgtacgtccccacagtcttcgagaactatgtcgccgatgtcgaggttgataacaagcacgtcgagctcgctctttgggatactgctggtcaggaagattatgatcgtctccgtcctctctcatatcccgattcacatgtcatcctgatctgtttcgctgtggactcgcccgattcgctcgacaacgtgcaggagaaggtgagtgtctcatctctgatcgatcgtatatcctggagcaaatttctgggtgcgaactggaccgaatatgctgacgcactacaatagtggatctctgaggttctgcacttctgccagggtctccctattatcctcgtcggctgtaagaaggatcttcgcgaggaccgcaagactattgacgagcttgccaagacctcccagcgccccgtttcgcaagagcaggtacgttttttcaacaccaccatgaatctattataaactaatataaaactacagggtgaggaagtccgcaagaagattggcgcctacaagtaccttgagtgctcggcccgcaccaatgagggtgtccgtgaagtcttcgaggctgccactcgtgctgctctcctgaaggccgtcaagggcaagggagggcgcaagcctggcaagggctgcctgattctctaaacgaactaattgttggtatgagagcctccacgaaaaacaattggtgacgttgttctcggaaaggaggagggcttcatggcctgcatgcgaaattgtggataatatcgaatccgggcacccgagtcgtggaggtttccccccacaattcagctggtcgaccttgtgtttttcttttgcctttatttgcagaatttgtctagggaggcgttgtcttcatcataaccctgtgggcttttctttttcttttcctctcgttccgacgccgtgaattttcaaatgccaaaccgccgcgttgaggtggcaactataaacctaccgaaaagcaccgaaaaaaagatcccagaattggaacaaccgggagatgaagaggggaagccattcagtgtagcaccggttgtgcaatttggtcaacgccgtgactcgccttccctggtcgagttcccctgtgtcatagattcttgtccctgcggttatctccccatacgcgaagagcttgattcggcttttactgttttctctccctcctttactacatttgtttttatgttacagcttatgcatggtactgtctatttccatctgatatgtgtaccttgtcatgcgtactgcgtactctgcgtagcgaagtgctccgtaaagctgtaaatctttcagtgcttccgaccactagagtattgcaacaatttcgagctatgttcgaatattgttgtttcgtttattttataagggcatattgatatacctaattctgcagacgcgtaaagaaaatccatctcgactaccgattcaaactaaggagaccctcaatataacgtctagcatccataccaagcccctcaaccagcttcgacggcgccatatccgcagcacgggaagaccccgtcaagccagcggaagaagatgcaccgcctagatcacggaagaagcgagcgccactgctgacacggccatgatttgccggggagatgtagtcgctcgctttgcggacgaggaaggcttcctgaggcggaggagcaggttccgcttgggactgacttgccgagaaggagtcatccttgttggctatgaatgagagggcggtggatgaagaattggtggataacgcggttggagtttggtttgtgctgtgtgggatgcggacccagacgacccaccatccgcggtgggttttgcttgtgcgttcaagctcttgcgggcgggaccgtgtgtctgtgtatgttgataggaggcagtgatggattgctaggctttcaatgcgggaccaaggtggcagggttgatgatggggaaggggatggagaacgggctggtgagttgggtggttgggtggaggaagaggtggagtctacgctggggatgttgggaatggaggagcggatggttaggttagatgggtcatagactaggtcgtagactggctgggtttgagtggagaaccgtttattggggtccggagagctctcggacatggcaattcgagaggctgccattgttggggatgttgatgataggagcggtttccgaagaggaccgagttggtgatgcatgcttgagtatagcgatggtgatgataatgctggtgtttcaggatcaaaaaggaatgtaaacataaatggttgatgctggagtggttatattagcaagctgatttgcatggaataaggagaaaataacataccacatatatcacgacctggagctttatcggagtagtatccgatccatctgccaggtggacatggagagtcctctgtactatcagagtcttcggcttgccgttctccgagtcgggctctgggcttccctcttctaactcatccaatttttctagatcatcacggggcccaagaacgaaatatcccgaaggaccgttcctcttgctgttccgatgttttacaccggcctggggtgattgtgtagcactaacgggctgacttttcgggtttgagatgtgtgaattggattcatcttgtactggagtaggactttcaggcggcgtagatgtcgaccttggagagaaactccaagaggagccatatccaagagtgaggtatttcatgaccgtctctgttggaaaccctatatattcgccgttttgctcggtgcgaagtggtgatgcctcgtttcttgttcctgcttgattctcctcaagtggttctgggagtggctgtggtgttgctattatgagcggacgaggtatacctggcttaaaattgtgatccggcgtggacggaggggcatcttccgaaatttgccttccacgttgctttcgtggtttacggcgacgcagcgaggttgggtcccgcccaactccatacgcagaatccccaaaccgataaatgcattccatccaatgtgatatttgcgccaatgagtgccgagaaagagcaccgacaccagtaaataccacaccgtcggatggtcgagggtcattatctgccccaagccatcgagtttggtcatttgaccccgcaggcccctcgaactgtggggatggatcaccaaacctggagacaaccaagtccaccaacccgtcgatccttgtgacgaagtcttcaagtacttctctttccccgctgccccactcttcctccccgacgccgatccccaactctcctcccgcagagagtttgatgccattatagatatcgacaattgggtttccggtcaacagaagttcccaattccacgcaaacttctcccagaaacgctcaagaaacagacagaatgtggaccttccgacttgatggaggatgtcgtccaatttgaagtcatggtgcaggaggaatgccgaatgggcgcgacgtaattgctggatcagtagatgtggcggccccatctctcgcgaggaataatgaaatgtgggggggtcggatgctccagaggatcgctgggctgtatcggtgtgagttcgggtcaggtcgatatgctagcttaacatgagcctttgtgatctgtgactttatctcaaccacttacagcaacaatccaccagttcttctccagctcaagcagaacgacccgcgctttgtccgtttcaacatattctagtgtctttccagctgagaagttactgtatattaagcacgattagattggttcatttgtgggggtttgcggggatgcctacctagcaaagttgaccatgccctgcgccagacctatctggcgcaaccgctcattctcttcatcttcgaggcatttttttgcttcgccttctgatgtggagccatcgatgcgccgtgcatggctcgatttagaagtatagaacacgatctggtccgctattgtctcgtcggtaggtccgagggacgggttatagatggcaaggtaggaaagttgggctggaatcaccaactgatgatcgctttcagacatcgcatcgttggatggcgttcacgggtcgtatgtaggtcgtaccagacaggcaacaacggtaatggctgaaagactgatccgaggtgggatctggatggatggatgttgatatcacgtgccttatcgataagctactatggaagcttcaactttctcccctgatggcttctcgacttttggcaattacccactagaatcatgtggattattccaggcccagggtgcctacatctctgcaaaagacccttggtccttcgagggcttgtctttaggtcatacgctaccaagacctccgatccgctccgcattctcttttgcggctctgatgaatttagtatcgcccacttgaaagctctccatgcttatcaattgaaacagccggagcggatttcctccattgatgtcgtttgtagaccgggaaagagggttgggagaggactgaagcaaattcgggaaggttagcttcactttacgcttccttgaatgaccgtgtatcctgattcaatttccctcagttccgctcaaagcggccgcctctgctctctcccttccaatccacgagattgatacattcactggatggacggtaataccaaaactcagcccaactgatattttcgctgaccgtggtagcccccaacctccccggacggtcatataaacttggtgattgctgtgtcattcgggctttttgttccgccgcgcatattgaatggtgccaagtatgggggcttgaatgtgcacccctcgttactaccgaagtatgtgattgctatatgttcagaatctccaaataagataattgacctgattgattagcttccgtggtgctgcaccgcttcatcatacccttatcgccggcgagaccaccactggcgttacggttcagaccttgcatccaaaacattttgatcacggagtgatattatcacagacaccggctcccgggttcgacatccccaatccagatttctgcaccgtccccgagttggtggatttcgttgcaccgaaaggagcacaaatgctcgtggaaagtattgaaaagggactattcgtccctcccatcgcagatgctggggctgaaaagtccggagatttgaaacacgcgccaaaaatcaccccagaggaccgacacatcaactgggcaaactggaccttggcagatatcaacagacgtaaccgagtgattggacctctctggagtaaggccctctgtgcaagcaatcctgcggatggacctctgtcattccaacagaaacgagtcatactcacgaatatcgaagaggttgacccgcctaaaggttctgattcgttctcaattctcccaggcctgccgtttacaaatgctcctcaccccgtcgagccaaggaaatcaaggcagctatatgtttttactgccgatggcaaggttctgcgcatcaaccgaatgaaagtggaaggcgagcaagatgcagagggtctgcgagccgctataaaagctcgcatgttcggtgatcgagcattccagtatgaaggccgggagttgactcccttccgcaactctcttgtataaatatgataaagttatgtgtactatcacctatatcttaaccaatacgattccgtttcctcatttcgatcagatcccaaagccggaatctagaaggattgtcagtttcgattctactcgctgaacttgagactcataccaatttgaactgcttgaccagttatagaagcattcttagccaatgtaacaaacatgtccgcgcagtcttccacctcgggctatagcgattcattagcacacatggtcctttcaagtcggcgagactataattgcttaccgctcgcttgagggttgtcgcatttgtccagccttcgatttgatcgggcgagaagcgttgaccctgggatgttctcagtattcatcgatcctagcattgagcatgtgctacttacccattcggtgagtaacaggccggggagaatagcattgacgcgaattttcgcgccttggctcttagcaagacacttcataagatggatagctaggcgatgcagagtcagtaatcaagcagcgtggtttgttggaatgatagcatacatgctgctttcgagacagcataaggcaagctgctgccacttggcataacgccctggaaagaacccgaaaatcagcattcgatgtttctatagcagtagacagtccaaggaaatttgacaagttttggtagcttactgcaatcgaggctgtgatgaggaagacacctccttccgggttcgcattgaacgtgggcaaagctgccttgaacaggtaaagactgctctttacattgaccgaccagcactgattcaatagtcagtcaaactaaagctcccactaccgagcatgcattcggtaccttgtcccagtcttcgtcgtccatggcatcaagatcgccgaaattggtcatttttgtccatcccttctcatgtattagcatttcgtaccataagagggattgattgtataactcacggcatttgagataataatatccaagccaccgagcttctcaatcgtggttttgacggcgttgatacagtcatctttgactccggcatcctgttttcaaatgcgagataatgtcagcgggtcaaatttagagaaacagcctatttacattggatttgagtgccttacgccttgaataaccactgtttttaccccatatttgctcgcaatgtccgaggcaagcttatctgcagtctctttgctggacatatagttgatagcaacgttgcttccctcagaggcgaacttctcagccgaaagagcacctagccctctgttaaaacgagattagtttattgatcagagcatattttcatgtttcaattgaagattcctaccgggagccaccggtgatcaaaacattgcgacccgacaaggaatagggcatgatgagtaggagtttatctttgagatcaagctcgattgctttgtttcaaagcgaagagacagatagacacaagattgagatacacaaaaggttggaggagttgccgaggaatattcgatgcggggtagagccgatcaggtacatttgacattttgatatttgacgatcaacaggcggagcttcggagaatcagaaagttatattgagctggatctttcagtgcagacagccacttacatagtgactatttccccggaattttcctcggtcgggatgttgcttttatataacacattgacgtccattatttgggatttctagatctgcattcaacagtccaagatcctatcttctatgatcatcgattatagacttcttacgctacagagtctagatcccacattgcctgtcaaccgattcatttttcacctaggtgcctgatgagaacgtcatttcttatgatatctgcaactatcagatcacgataattttaaaatagaccaagccggtgtaaatacacggcacttagatcacaagccatcctgcatattgggttctcttcatcccccaccaggcccgtcgtccggcctgggcaggccattggacaagaaaacggtcggccagaggcaacagcaagacaccagaggtactaagcgagctcacacgggcccacgattcgatgtaaatagtgcgtagctttggtgccaatgcgaacgaggagactgttcgcagacccagacacaaggcagcgcatttggccaaacatagaaagaaacgaatgagttttgcgcctgcgacaacgcagactgctgtagcgggaccgtttgtaagaatcaaatcagggtagagtgagttgtattcatttgggagcctttgatccgggtgaagtccccgaagaacattgagacaagcccagaaacatcgaagcgtggagaatggcgcggtgagataggattgatggacccgtcgggcacggggcactgtgacaatagtgtagttcttgttatgggtatggccctgagaattttgtacatgttgagcctcgaaatccttggctttgtctgcgctgaagttatctccggagctcacgaggtatgtccgatacgtgtagatttgagggtcgaaattcatgcgctcgagcatgtagagcatctcagctgtgtgcccaccacttccaagtacaaccaacaggtgggtaggagatcctcttgggcgacatttggagggaatgatattctgggaaatcgtgagcgagatgagtagaaactaggagagatagacaagttagattgattcaatggtacgagtaaataatacccacgagaagaatgctagccccaagtgcaattgccaggacaaaacaccaaaggagcaggccgccgaaggataaagaagcaagagagaaggacatcttggactgctgttgtatggcctcaagagattggtaagacagcccgaggattttaatgtagcattgtcataagaatgaagccgaagaacaatagaaagagaaagagaaacaacgccaactatggcaaaaggcagtcgagcgcaagtccgcaagtgtagatctttggataaattggagtcgcggtacatttatacacgtcccccgcacgtgcaagctccgacttgttttattttcctctttggcatccggaaatttctcccttgtttacaccaacgcttttacttgtgcttctttccacgttactatgtcatggcttctctattttctaagcgtttgacatgcttttattgcgggcagcggtccgctcgctctcatcacgggcctgtttgcaatttccgctgtgaacattgtgaggctgacaacttctttgacgaggtaggctcattaagaaatcttttcactggaatatactcggactatgctaatgactgtttgccaaaaagaaaggagaaattacagacccaccagctgtggtcaccaacgcctacgcgcctggcgcatcagactcacccttcgaatcgactgacttcggtggatcacagttattttgcgccaaatgtactcggaatcagcatttatttaccagctccctagcttcctacttccccccctcggacgatcccaccgatagcgaatacgaacgcgggtatgagcagttccgcagaagcctagaggaccggtacccccaggtttgcgagtcttgcgaacccgttgtgaaatcccgtatcagaagagctggctacgaagcgaaatcagatcatctcaggcgcatgatggatcaaagccgagcaaaccgagaatcacgacaggcgaggaaccggagctggagaagcttgcttcttcttgcgggcgcacttgcatattgggctagtattgctggtcagatagtgtggaacttgatcagtgtagctaccctctaccaaccctcgccaagtttcgattatttacctgagaccgaacgacctccaatggcacccaattctgtgatctcgtgcgtcaaccagtctatttgttcacagcgcattcccagtgaatgttcccctgatctagcaccaactgccggtctggcattgattgccggtgcattttcgctctggtggaatccgaagctgcgtatgaagatagacggaatgcccggtaaattccgcggtcttgcagagtactatcaagctcaactcatcgtcatggtggtacgatgtgttttctgggcagtggtcaaggatccgtctgccagtgggttagaacccaaactgattcctgccttccatgccttgatgatagttttcactattctggtaagtatatttttctccttgaactttccatgcgctaactatggtagtcggttttgttctctcgatatgttgtcagctactctagtcgtccactcgtcaattggtctgataatagctgggaaactcaattcgaaagtcctaaggcgtcttcatctgtactgcctgagtcacctatgtcgactcgtatcacaagatctggcggaacaccgaaggcaaacattggtggattccaacagcgcttcccaattgataaattggcccaggcccaggctcaatctccgtcacccgtcgagcagccgcttatggttgcccccaatctgacggataatgatggcatggactggtctccatctattacccataacctccgaccgaccgtgacacggcgagatcagccgtctgtgctcgatggtcctcatccattccaggggcagatcccagcagctccgatgcctcctgcgtggaagcttcgtacccagacttcaacaaagcctatcgaacaagtgattcaacctaatcccttccaccgcagtcctatccaaccgcaaggccaatggcagcaaaagcgtgctgatgccgaaccagtgttcaaggaaccgaaatttttccctcctcatgatcatgatacatctactgggctggaaacgctgtttgaccgtgccttcaatctccagcccgatgctgcgcaaggacctggctggtcccagcaaccgcagagcaagggctcgcgtgtcgatgcgacacaaaatcagctcttttatgggtgtcttcgactaggtctgctagtcagcttcattagcgcatggactatctctcagaatcaccaggtcttgattccaggaaattacgtggagatcgctgcgctaggcgtggcaagccttgttgcggggttcgctttgatcacgatggtaaaaaagcctcttgtgcaatggaatggcatggagattctgatttctatcaccgaacttggtgtcgctgttcacatgggggcccatttgcccacagtttcgcttaatcgggactacttcgatcgctacggtaaactgctccttgttttcatggccgcacaggaatctatgaatgtattgtccttctacaataaggctaaatcagaaagccggcagcactcagagtctgtatcactacagccacagccacagtcaccgcgtcagagtcaactgggtgcccttgactggtccgcaagtcaatcttcatccaagtctacacctgaacctcgagccagcagtccgcctgtgcaccgatcattcgagtcacagttacccgttcctccactttcttttggcgataccgaggcggcctccagtttctcttcagcattaccatccgtgccacagtatgggcttgccgcgtctcgaaatgtccactcgttcccccctaccaaccagagcgtcttcaataaaaacagaaacccacatagtttcactatggaatctttgaagcaaatcgagcctgtgtctgattatgagcgggactcggacaccgagactatcgccaccactacaaccaccgccacaaatttcaccaaccgtaacattcggtatgggaatgaccccggtctgggttccagtgccttttattcaccccgacggaatggtctcggatcaggcatgggcggtttaagcttggatgatgatcccactccccgccgcatgactcgcagccagacccagcgtgggctacttggtcgccgtccgaccaactacgtccgatgatttctgtttcactttacttatccttccgttcttttttgtagtcaccgtttagcttcttcggtaccactggccattctatgtccctatcattgcttgcagactcgaactcgctacggcgttgatcgattgagctagtcggttgctctctttctttctctctttctgtttctactttcggtcttccggttttgattcaagcgaatctcatgggttcatagcgcaggcgaatgtttcttttagttcgatatcgacgggtttagctgcccttcaaggtgttgggaccgctgtacatatctttcgagagggttgaactaccccggtactttgatgatgtctatgaaattacgatgacagatgtgaatactctttgaaaaaatattgattttgaatttgatcccttacgttcgttcattgaagttccacatagacttaaactaatatccctactcattcaccctctcaacatgcaccttggatggcttgtccattccagcgccaatagaagctcgctctgtatcgacattcttatgctccagcagctgcgtgacgccaaagagctcatccatcttctcaagggacaaacctacaggcacaccatagtcagcaaaagacaccattatatactatcaaaggactcgactcacccttcgtctccggaataaagaaccacacaaagacacacatcgagaagcagaagcacgagaagataagatacgttctgtacggcccaaagtcagcaaacttacaatcgaaagcacaagccaaactcacccataaccattagcaccaacagtggccagcatattcggcacagccctggcaacaacaaagttgaacaaccactgcgtagcagccccaaaagaaacattcagtgagcgcagcctggcagtcgggatctcggagacgtaaatccagcagacgggcccccatccgaattggaaaaatgctgcgaacaggaaaatgcacaccagcgcaaaatacccggccgggatgacaggtacgccctcaactggcggcgcaatgcgcacgtacagtccaatgtacatcattgccaaaccctgcgcgatcgaggtccacaggagggagcggcgtcggcctagcgagtctgccacaaatattaggaacacgccgcagctgatcatctttacgatgccgtagacgccggttgcgaagaggttggttgcgttaccgagctgtagaggttagcatctgattgtattctcgggtttagggcttaaagataaaagtacgggctcacgttttgaactgcgactgttagctcaagaatatctcaacagtttattgggatagtagcaacatacaaatttggggagcatagtagttaatggcattagttccagtcatctgctggcaaatcatcaagacgatagagataatcgcgcgcttgcgattacccggaatgagccacatctctttcatcaagtcccagaagccggacccagcgacaagtgcgcgctcctgttctagctgggtggcaatggccgcgaactcctcttccacgtacgggtggttggagggaagattgcgcacttgggagagagtcgcgcgggcttcttcccaccggtcttgcttggccaaccagcggggggactcgttgcacaacaacataccgaagaataggagtattgcgggtagaccttgcattgccagtggaacgaggtacattgcggggccctcgatattgagcagcgagccgtaattgatccagaatgcaagcatgatgcccattgtaatgaagagctggtatagacctgttagaccaccgcggattgcgcgcggtgcattctcggagacatagagtgggttgatcatggatgcggcaccgactccgaagccagtgattagtctagaggtgtggttattaacttgagataatgggtggaggactgggggcggaaatatttgtcttaccgtccgatgtacatgacttcgatgtggccgctggctgctgtttgcatgacaattccgagtatggccaccaccgctgcgccgattagggccattcgtctaccccatttctcggctaccggggaggcaaccagagccccaaagaaacaacctgcttggagcgtggatactatattggccgatagatttgctgccgcaactttggagatgttctcgaggccgtatgtcctgcagcaagacactggtcaacatagctagacactagcagtctattgagcagagataacacacttcttgaatcctggcatagttaaaactccgccaataataccggagtccatgccaaaaagcattccgccgaaacaggcctgggaagcattagctctataatcctagaattattgtcattgcgatcgctaaggagagactgaccgaacaggcaagcataaagaccctccacccatagatctctttagggtcttctttcatcgcctcattgtgaacaatcttttttagaaaccatgacatcttggatagaagcaaaaggaggcaagtcaagatgatcgcagtgaatccgaggggagtagctagcttaaaagtaattctctgagactagctcatgacaaagctaaactttagatgccgtcgacttttgatatgcatataaaagaagagaagagactatgaccacaagcctatgggaggtgtaattctaagcccagttgtcttggccggccaccgagcggcctacggaacaaaagcagccccccgaaataaggcgagcagacatgaatgaaaacttccacgaatccgaagcctggcacgggctgcagaaagctactacagctcacatggctagggtgtttgggggttgatccgaacatgattcacgtgctttcagataggagtgcagttccagggtagtactttgtatgtgctgatttatcggcgatattccgagcctgaaaaattacaggaggatagatagctttagccgagaaagagagaggagaaacttcgaaggcttgaagttgtcggctgttgatcttaccccggactgcggggaaactcaaaatttaaggctaatcccaatgcggcaaaacaatccagaataggatgagaccttgaaaccagaaaccagactgattcattgcacgatatcagattgtaatgtctgataggaatcaacttgcttctgcactttccatcctcttccgtaaccactcaggaataactggcttcttctcccaagctgccttccaatcacgttgacggtctggcacagcataaacggctgagacgaaccagcaatcctggccagctgccaagtccactgcaagtgacggcaaaagcgtacgtccgtgaatgatattagagttgggatcagccaagacgatccgaccaacgcgcccaatagccgaatggagctcggcgatgccaacagccccagccgacgaaaccacaagtccactccggctgtcatgaatcgtaccctctgagtcattttcagccataggtcccaaggtacgaccattatcgctgcgacatccgtaaatagcaaaggcaccttcggaggtctgcagagcgcgaccggtgcgcacatggtgagcgcgcagatgccaattctcggtttccgccgttggtggaattagtatagtctctatatcaacatctggccacggtttccaaccagaaacaagaattggctgaccattgggctcgggttcctcgaaacgcgcatcaagcgccagccgtctagtctgccaaatatcgccgccgtcgtctgataaggcaagcatgctgtctggggcgtgctgttctagctggtagccacccgttggaaccgagtatccaaaggcagaactgtatgcaaacttgccatacttggcctgtgtcgctttgagggggtagtggcatgcttgaccagatgataacaggaacgagtgtcccccacgacggatggcaatatgtttggggtattttagggcgaccacttcaggcaaagaggaatttgggtagggctcctcttgcgcggaccagaaggggtgtgtctcaggtagtgccagtggagtgaaagagagacagcaccagtacggtgacccgggagaattgtaattctccgttaggtacatgttagcataagagtagccgagactcaaagtgccatcattgtgaaaaatgtcatcctgcgtagaccaccaccggaagtggcgaagtatgattccccttaccacgccccatgtcaatggttccggtagttcgacatccgcgaagcctaatgcaccccaaaatccaaccatggcaaatcgataggtcatagagcgtccgaacgggatggcactgcctatttgcttgtacgtctagtcaggacaaagtcgcatctcagaagaagggatcagaaagacctgcccaagacgtaccgttaggatcgaagtagtgcacaaaatctgtagcatactcccgtgcccgctgacgatagcgttcagcacgctcaggatcgaattcacccgccagcttggaataaagaagctgcaagaactgaatggcgaatgagcccgagtagtagtccatctgatgatgactcttaggtccatcgttgctccatccccctccaacatggaaggtatccaaatggtccatatcagcctcaatgcgagatgaagagtattcggcgccattttttctgaggcccaagtttgcaaagacgcggaaccatagcctacagccgtcccaaccgtaattagccgacttattcagtccacaccaaggaaagaccctactgggcaaatcgagacataacataccagttcgtatttggcatctcgcgcgcattaatactcgccaaccatctaccaacattccccctctgcttcgccgtcaatggatcccaaaagacatgaggcgcaacagctagcgcaaacccaatcggacacatctccaccatgcgctgatccatatcctcgatatggccccagaactccgggtgttcgggatcagtcccgttgatgattccctggcgccagcgctcggcctcgccgtattcatatccgccgcccaacagcgaggccaggccccatagcggacgtgcgtatccctcgatctgggcgccgccttcgtcgaatcgtgtcgtcgatgtgcctactttgacgcgtgtgcctcctggtgtaaagaggggtactagcgggttaagaatggcgcgacatgcttcttgtaggtcggatctagtgcggaagggggatttgctgaaggcctgtgagggggttcggccgttagcgtggatagacatcgtaagtctgtaggcctggaggctgtggggaatttgtgttgttatggtagctattattcgtttgatatgttattataggttttatagagattgacatcgggttaatcgccgattattagctgcttaatagatacttcatatcggggttcgggtgaatatgccgacatatagtaacaccctggacctgaggccatcttggtacaaatcggaattcgctgagaatgccgatccagccagttggatctgtgcgtagttttgaaggatcctggggttagcggggggtttggattcagccggtcgacgtaatgtgtggagatcatcagtaataagaggccagtttgttcgaaataggctgatgagaatctgataagcgggggaactatcgtccaccaataaggaaacaggctaagcaaccaatagtgtggctcttgtcatataggaggatatcacatggtattattgtttgtacatagggctcaacagcactcaatatctatacacgtctcaaattgcatgacaacaatgcaattggacatctaaccacccaataggccccccaagaatcggcccagctctttcacaagagcatcatcgactccctcggtctcaccaagaccctgttttaggatctcggtccaccgggccagggtaatctcgtgcagtttctgtccgttcaatgcggaatggacacggctggcttgatcggatgcgatggactcgtcagaggagacagatatgtggctttcgacaatagcgccatgctgcagacggaggaatgcacgagtactagagggaagtgaggagggaagtggcgggcgttcacgaggatcttcctcgatcgggtatgttgagaaagtgaaccgcggtgtttgtgtgtacttccactccaacgaccgcaactcggcaattcctttcccaatggtaggcacttgctccccttgtacatctcccactgtaccagcaacccaagaatccccagcgaagacttcaggttcattggcatgagcacgccgtgccctgagaacagcatccggatgtacctcgtagagccgagcaaactgctcgatcacaccctgaaccacgccctgcatcgaaaagaacgagtcggccaacgcagacgagacattcccgactggagaacgaacgctttcaacacccttagcctggatatacgggcgggcggatgatcgcaggtaccggccaagatcatgaatgttcggggaatcgagcaagcaagtgccatgatggagggctcggtgtcgagtaagcttaaacgcagatccagagatcttgcgtgtcagaggctcgttgggatcattttccaatccctctgctcgggccatgacaatatcatgccgttcattgacactagtgttggtagccccgacctgatgaagtgcgcgcaccaccatctcggcatgcttgtcgcgcgtaaacgaggtccgcgggcatataacgctgtaattcaggttgccttcatcgtgaaatacagccccgccacctgatcgccgacgcacaaatactgcagcttcgtcttctccggtcgtgccgttccggtcattatgaagtgctcggagatctgtctcaagccatgggttctggttgcgaccaatgactacacatggtcgattggcatatagaaataaaaccgtggactctgtcggggcgttttctagtaggaagtgctcgatcgaaaggttcacgtagggatctgttgatagcgattggtagatctggtgtaaagaggaagggcggctggcgagctcggcgaattggtgagcgggatatgacgaattatggcggatccagccatattttagcggattagtccaaggtgccgaagacgaggaacatcctcggagggcgagcattggggcaaagtggaagaggttatgagcgcatcacgaaagttatgggccgatagtcggttgcgctagtcccagataggaatctcagcgatgagtcgaattcaatttcctttttttctacttgcggtcagccatcaccactgttcttctttcttattctgcagtttttattgatctcaaggtctttgaacgtgtaaattatcttcaatcccttgcgactatctttgaacgcccatcatgtcgacgtggggtcaatatttccgtgtcaccacgtaggttacccacccctcacaaaacacattgttactgacacccacaattcagttatggcgagtcgcactgtcgctctgtcggctgcatcgtcgatggatgtcctccgggattggaactcaccgaggccgacattcagccccaaatgacccggcgccgtcctggccaaagcgctctcactaccccgcgggatgagaaggaccgagtcgagatccagtcaggcacagagttcggtatcactcttggtacaccaattgccatggtcgtccgcaatgaggaccagcgccccaaggactacggcggcagcacaatggacctgtaccctcgccctagccatgccgacttcacctaccttgagaagtacggcgtcaaggccagcagcggtggtggtcgcagcagtgcccgtgagaccattggtacgtcatgtgtaactatcaacgccagaagcgattactcttgctaatccaattcccacaggccgtgtcgctgccggcgccatcgccgagaaattcctcagcctggcccataacatcgagatcgtcgccttcgtatcctccgtcggcaacgagcacctcttccccccaacccccgagcacccctccccctccacgaacccagagttccttaagctgattgagacgattgaccgcaaaaccgtcgacaccttctcgcccatccgatgcccggaaaccgaggctgctgcgcgcatgaccaaagtcatcgagaagttccgcgacaaccacgacagcatcggtggaaccgtaacatgcgtgatccgcaacgtgcctgtgggactaggtgagccctgcttcgataagcttgaagccaagctcggccacgcgatgctcagcatccccgcaaccaagggcttcgagatcggctccggcttcggtggctgcgaggtccccggctcaatccacaacgaccccttcgtcgtcaacacgtctgaaaccggcagccctcgcctcaccaccaagactaacaactctggcggtatccagggtggtatctccaacggcgcgtccatctacttccgcgtcgcgttcaagcccgctgctactatcggccaggcgcagaccactacttcttacagcggtgaagagggtgtcctggaggcgaagggtcgtcatgatccttgtgttaccccccgtgctgtccctattgtcgaggctatgtcgtcgctggttatcatggacgcactcatggctcagtatgcccgcgagggcgccaagaacttgcttccccagaaggctcagactattcgtactagtcctactaccgcgcccaatggtgctccttcgttgtagacgggaggaaacctgacaatttattaaaatgttatacgcaagcgtcattaagaagggtcacgtctatgtctatatacgtatttgatgtatcatggagctacaaaagtgttatatagatgccatattcatacatttaccaatttcgggaaaatctacaaaattgtctaaactatagttattactcttaaagcctcaagaagcctcaaagcaagacatcaattttgaatttgccacctaatctaacaagcgctcactcggaaccgaagaatcacgaaaaaaagggaacacatggattcatcagaaaaatcattcttatctcagaacggcatcaaaacatcgctgtggatatcgaaacgacagaaaacagcagccacccacggaaagcagtgtgacaaaagtaaagactccaagcgagaaaaccacaaacgcacgctaaagttgtgtacaaacgacacaatgcaatgtaacacagcacacctctaggtgtctctcatagatgcagacaccaaaccaagctcacctaaccaaaaaaaaggacacaaaacaacaagtgagaagataaaaccaaaaaaagagaacaagaaaatcaggagaagaggaaagatgccagatctcagatctaggtactaactctccggttccctgtgctccaactaacagagcgctcagacatactatcaacatcgccagcagtagcattaacgacacgaagtttctctcgaggaaccgtgaaagttatctggactcgtcggccctcagcggcaccctctaggtcccaatcatgtacatcttcctcatcatcgccgaagccagcttcgttgcccagatatcctggcgcgccgatgaaaagatcatcgcgtgtagaccgagcagtgttaaacacatcgtctgagactcgtttacccgcattccagtctttggcgccctgcttacggcggaataactctgctgaagcgctgactgctcggcgcggggagctagggcccgagcatgtggattgttggtcagacccgagtagcgtgctgcggcggtcaatgccggaggcccggtgcgctgtgctagtggtactagcaccggagtctagctggctgtcggggctgcggcgggtcattgtcagggctcggcgcatggtgttaattacccagtcggcaggtttaggttttgattctcggggcagttttgaaggggatgagggtggtgagggtgatgagggtgtggtggggtcgaaggcatcaaagaggagggactcgttctccgactggcgatgggacatgtttgtcctggctgtagagtaggaatccgccgaaacagagttttccgagggggctacgccgtctggatcgctgtgtactgagcctgcggcgaggtattccagtgactgatgtccactgccccagctcagaggtcgatcgacaaggatagctcgtgcttgattgaccttgcctacaggttgggtggatgcaaaggagaatgtcgaggtttctgacagattggtggctgtttgttcgctttttgtcggggacacgggatccacagatccaatatcctttcgccggctgtagaaaggacctaggccaacgccgaagatggtgctccgaggagttgcgtagggggtgtctgagaagggatcttcgggctccgtcgtcttgaccgtgggtcttgtttcagctggagtgcttgccatgagatgttctcgtaggatctcttcatcttcctcgcgttcatcaatagggtggatatcaccagtagcatcactccaccggtattcgctgtttcgatatgagaatggcctattgctcactggaggtatcatgggggatcggttatttttggctagactgggagggtccaccaacagcccagtcctctccgccgtgccttcgccctggactttccagttgggttgtgtcgtctggcagcggtttgccgaccaaggatacacgagggcatcccttgtttggctcattcctgagccccgaatactgcttgcttgtgttggacaatctcgaccccaaaagtgagatcgttcggcccccaaagcaagttcccgtagctgcgagtctcgctggctctttccacggcgctttcggtgatagttccatccacataaaacaatggctatagcaacagggcatccaatgcccagtccaacccccaagccggccttttgggacgatgaaagcttaccagaatgggggaaagcattcgaggaactggctgcagggttgctgtaagaagtaacccaactgctcgaagtcacattgtagagatagatctgcgggttggactgtgtagtcggtaatgcccgtttcgaagacgatttcgggatagtgtagcccccagaaatcatcatcacacccccagggagcattgccgctccatgtccgaagatgccagtaccctcggtgattcctaagccttcggaagagggtgctgtccaaatccattcagtggttccaccaaacccttccgcaagatctagaactgcaaactgcggctcagcagggacagtaatatcgcccacccaacctccaaacacaaacactttatttccatcttctgagagaactgctgtgtgaccggaacgaggctcgatagaaaccgtatcccgaacagtcagctcagtctttggcgtcaaattcgagactgcagaaacaaagctccagctttgctgcggcagcgagaaaatggcgagttgcgacatgttgaggaacgcctgcctagtatgaccaccaataaacaagaaatcctgttgtttccccgtagaaccggcagcatatgtaggctgaagcggcacgacggccattccggcttcagcgatgggcggtgcgcgcttgccagtagtggcagcggtgaacttggtgttgtagtagggactcggccctaacacgaccgtcgagtgcgaatagttggctgcggagacccatgtttcgtccgtgctgttggcgaatggacacatcccaccaaaagcgtacatggagctctcgtcctcgttccgggatgccgaatacgtaaaccccgccgccagatagttcggagcggtttttgcgtcgctggtgataactggtagtttttgccaagtcccattgccgactgggctattgctgtttgggtggaactcccatagtatcggcttatcggatgcgctgtggcagttgcccgagtagactgtgatgaacccttggtcattgatggtggaaatgaaactcgagttctggtcagaactgtagaacggcgtgctcttcagcaaagtttgataggataaattctcggcgtcgatactgctggacaggttgagggagacgaactcggttccgccggtggagctaggtcggaggatgtacgcgagggagtcattgtgttgtggggaaaggaagatagaggacggagtgtatgggattgcagtagagggaccaccgagtgcaagaagcgcaagcagtccctttgccttccgatgcttcatgctgcttgcgatccgagacaatcagaagcagggatacattccaagatcggcgagcatgacatgccacgcgaagaagagtgtctatttttggacagtgcaatgcagatattaaatttgacaggtgtcaacgtggtcaacgtgaacggtaatgaaaaggtagaaaggtaaggagatattggaggggtaacattgtcttcagtaaacaagtttatcatcagacctgggtctcgcctgttctctatattagaccaatcatcaatcacccaagagtaccaagagtcacattcatttactcggctttgtttgcttgcactaaacaaggaaagagggaacctaaagtgttgccgcgagtcagatcgacggattgacttcgttgctgggcaacggcgaggtgattgcgtgtttcctcatgttttcaggtaaactcaagagcatctcctacatatgcagctatgcacaccaggcagtagcattaaatgtaatctaattaacttggcttgatttttctcaatattagaatccttcgacgttattcaaatctccaagtggcctttagtaaagccggtatatgtttcagactacatcaattcaatcgatctattaccagatacggggtttcgcaccttttaccttttacattttaaggtcgttcatcacggaacatcccgaggctatgtacgatctacacatgtatgcttaagttgtatgtagacatgcatattgccaagattaggagcggagcgcgctaaatccttgcctattcccattctagaaaaggatgggcaacaggaagagagctagaagattcttggaagaaatagcttgagacgttctagatatgatatatttcttgggcatggagactaaacatgaattaaatgtgaaaactcgctcaaaagttaagtaagaagccccaatttcaccattgaagcggttataaacgaatgtataagtggaatagacatgtcttcctcgtaatccttaacgtttcaagttgatttcatttctttttaccgcatagctaaagggtagctgagactagcaacttgcaagccgcagcgaattcctgcgatgataaaatcaccttattcctcaggctggtcaagatgatggacagcatgacctcctttccggcctgcttctttggctctctcgcttcctggctcgaattttccacgcgaagcatgaccgcctttcaaggcaatgttcctcttcagagtcgtcagtttgctgtatatggaataagacactgcttttactaacctgcttctccttatccatatgggcaaatccgccgtggtggctagactgtccaccctttcgagcaatctgctcgacctcttcgtgaggacggttgtggaaattaccggggttggggttgtcgaccattgtgaatatgtacaatatgtacagagtagtattatgattgtaaatagtttggaatgttgaaatgcgtgatccgatgccaaattagctacgtatttatacacaactccatatatgtaacgccacggggtggctgttgacagatgcgatggagtcactttgacgtctattcagccccgacttttctatatttgcctccactgagaacttgccatggcctcacaacgatccattcaggggagttttaaggaatattatcaacatcatcagaggagaatgtcaatgccaatttctattacatcgtgttatgggcccaagagcaagccatagcttcgtgttgaagaaaaccgcatcactatcttgtagatatgtttagttctcgaagagttcgaagatcgaagttctatagtaaacaatcctatatatccttagacaacaagataagcacatatgattacatattccatataattaggacctgagtcaaaagctcaatatgtccaaacccatggtagataaacacatggcatatgacctcaaacatagatagtggcaaccttgatgaacttcgggggacatcgtgtgattgcctagactcaaagcctaatgttgtctacgtcgatattcgtcacgtcgccgtaattgtgtcttttgacccaattcgtggatccccgcctcaatccaaactaatacaccaaccttaacatataacttatacgataatgaaaaccaattaacagcatttcatatacaatgtccgggaaagaggtccattgaacgtatacagccggcaaggctcatactagcgaatttatttcgtagagggattaggcatccccgaagtatcaggccacttacggaagaggtccgccagatgatccatcggcgccgttagaagccccacaactgtctcgtacggaggcctgtctggtgcgctagggtgagaacgcgaagggacgaacatcttcgttcgtccaaagctcttagaaaggccctcactctcctcttgagacaatgcatcctccagtttaggcaaatcttcagtctcctcctctttgatatgttcagcaaggtcctccatcagctccctgacagcaggaacaaactgcgtatttgaaggtgtcatgttttggaacgccttcaattgcgttttaaccttgacccatcacgtcacatcagcactctgataggtaggtggcagaggagcttaacttactttctgatgctggtcacggtccttattggccatttccatgccaccggggagaagtttctcgaagagagggtaaacaacaagctcttctccaatggagtgtcgagctagttcccaggtgaacagattctggaaacgagtttgttcatcctcgtccttggaggtgattatcttgccatagtacgattcaatatcccggtgatcttttttgatcgtgtcaatgatacggggtgtcatggtagtaggagttgcaattccacgtctctgggcaagacgtgatacgagtcgactgaaagtaggggttcttggtgcacaaagagcaaaagtcattgtggccttggaaggggagattcacgacagcaatctcaagttctcgacaagctggaacgtggactccttataccagatgtaaatttaggcacaggcaaatacagtgcaagtcttcatttgtctatctgcccgctagatcatactgacgtgaagtaaatgcatgtagtatagtaatggaagatatggtatttgctgcgatcctattcaagcctagacaaacccgaaagtggtaaattgatcttacgtctaatgggtgtcatgagtgtcatgtcacatttatataatcctcaaagctcacctgtgtacctaggcgcatgatcttggatatttatgatatcacatgtgattcgggcagtttctttgcgggaaaactatccgtcatctttgaatcatcaatgggctcttgtacgcaggtgcgaataagcgcctcgcagttagtgctttagactgaaaggaaagttttccgtcatccgcaccgtggtcatgtacccaatcaggaccatgtttcacagtgtacggtgctctgatccttttacaaaccacactacagttaactgttggcatggtagtttatgtctagttcgtctatattctgcctgttgggacaagttagcgttcagcttctagcaataggtactcacgagttgacatattcctagcagccctaagcaccctcttcaaccagcgatatccaaattgggcaagtcgcagctgcggcctaaaatccggtgcatacagctatatatgtagtgtcttcatgtgaaaaagaagcaaagtctcggaccgcaacaccccaacacggttctgtggattccccggcttacatccaatgttagcataacaaccgagctaacatttgactttcttgtatagctagttcgcatatgtgaaaatgggttgtctggatagtcttattgagagaactagaaaaggagtagacacatgtctaactatgaacagaatgtccattataagcgtggagtatgtcctgcaatcccaatggagctagcggtgtaaataactatctcgcttattaaaggcaactatacgagacccatgcatggaagaatgctcgagcggcggctaccatcgtcagccaccggcgttcggggacgttggtctcatggctacgagaagcgaaggggaaagcaagtatcggtggaaaaactagtcggcttcagccagtcgatctttacggataaatgagattggacaggtagttcatccatgctcggcaacaagaggcaaatattcgatactgcacattgccttgatgtggactataaatggggttccaagacaaagtcgccacctgtggacttgtatacaatcacatgtggaatgcaagaggctagaggtatcgacaaggttattctaatttatgatcaagtactaaacacctttgatgctcaccccaaatcaaaaccattacgggatagagatcaacagaggatgacaatctaaatcaaaccatattgcaccgtgcctgtgcataaacaccgtgcaatatagcgctagcccaccggtgtctaatttccggtgctccgctctgttaaattgtaaatccgactcgacgttaacacagagtaataaggcaccagggtgtgcacacgcccagtcgactgggactcaatcagagagggagaacaaaaagccaccttgcccctttcgtcacacagcaggatcaacacgagcaatttccctcaataagcatcagcgaagcccgaaatggatgagggatatagaattgggaatagtgttgtgcttcccgtgagctttggccatgctcgtcttcgtgtgctttgatcgcttttgcggtgtaggtggcgctcggggactgtgggtgctgtaggtacatgcatcgtggagaaagcagagtgatgttttgaacctggatgtggaatggcatgaaatgaagacgggatatgcagaataaagattattattttgttgaaacggtcaaggtgtcgccaaccacccggacaattgcctcacactccaacctctaggtcctttctaggattagcttggtttggaatcgcatgcatcggcgccggaaatggctgcagaacgtgttgtctcggatattcaggccgaacttccattgcgcggggcaaactgtacaaccatggtaggaatgattggtaattcttgcacgctctacccctgtgctataggatgacgagtatcgctcagaatgcggaatataacgattgatcagccttcttcccgctctacatgcgacagcgagggcatctgccccaatccactcggctacatctcctgagaaacgggctcatatactagttcgagggaataggtagactattgaaccccgcgattatatgtctaccgtagtttagccctcgatcgagtgatcccccgcatcgtaagttgtggggcatagcgtcttatctggagtctggtccctgggcatctctggttccccggagagttctaatggcatgtcatgaccttggaatgcagataatgtaagtcggcaaattaccgatcgtacttcagggttacacgcaagaaaataaatcaaggacataggccaagacgatacaagagaaagaaggctaattaggggccagacccctatatgacgtcgagtatacggagtcgcgcacagataattttatgcacggacagcggatttcatgaggatttcctcccggaaagagcttcatgcaggacgcctcccggagcctgggagtattctgtagtatcatagtaatatatagtgttacagtatactatatggcatataagcttataacatccctataacatgccatatatatgtacaacaagtcggagtgtacaaagtacatccaagaaagagtagagttccatccatggatacacttttgccttttcttcaattgactgggacgacataaaacggcaaaagacgtccttgatacaaccccttataatacagcttccggtattagggcccagcagttcgggcagaagttatgagcgaatctacgattggaggtaaaatgatctatagccagcaccggagtaagatagtctgtctgtaaagatgcaggcctcggagccgagggagtcgagttggaataataaaaataaggatcatcacacggttgggcgaccatggtcggtcatttacctacttggcattctcacgatggcttccagtctaggctctttgcctacatactcgctgaaaactgtcatggtccatgggaattaggctgtccacggaagagtcctcgacgtaaggacccaagcccagtggcaaatccgccactgggaacaactacatttacaggatataatctgtatattctatattctatattctgtctataagatatgtattatagatgcacggaatagtaggagtaccagattaatctgcaaacagcgcggaattccagagctgatagccccactagatatggctaaatcctgaaatctgatatattcaatccccccaagtagatcaattggcagttcgagcgtatccctttttcctttttcacacttattttttataatccgccattcggttcaccattgacttggtaaacttatcttgtttcttggcatcccgatcatcgctctaccctattacccaacctcccccttcaactcttcaactctcccctcgactctcggtctctctacacatctttttctcttctctttctttttttgtaattcttacagctgcttggctgtcttgcctttcctttccacattactttcggatctcttattcttgattgattccgatctcgctccccccacctccacatcccccgagaactggccatccgaatgagccaaaccccgaattatttatagcatctgttgtcaacggcactccttttttttgactcatttccccacgtgtggatgtgggatcgtccataccctcgtgcagtagcaggtctacctcgtgtccttcccccctaaggcgacaacccgctgtccggtacacggtttccgttgccttgtcgccatccctatcgacttcacgaaagtaatgccgacctgtttgtgcgtgcaaacagagctttttgtcagctcaccttgaatcaattattcacgagggaaacccccgcaaaaaaaaaaaagagtcgaattggagaatgttcaattaggatgcacaactgcactcggcacagctgcctcagccccctccctttgaaataataccacacaggaaggaagaagggaatatgacagaaaatagatcctcgcaagctggtctggaggatccagatcagctggctcggaatcatgtctcaaaaaatcacaagcgagatctcagccggtccgacgagtcatcgcaactcccatctgcgtcgaacgaccaactcgagtatcgcccccaatccaaatcatccgcggaacaaccatctatcatcaccgatgtctcggaagctaccgcaactttccgccaggccttccccggcgttggtggtgctcgggccccctcgaatcgctcgtcgtcgagttccctacaagccctcaacgaaggtatcgtggtcgatgtccgatcggaaaatggaagcattggaaggagcactcgacgagcctcgagacactcggataatcaattaccagtttaccccgatcaatcctatgcctccctccagtctcaggtgcatcccacctaccaccctcacctcgccgaaccagatccgctacccagacactcctatgcccgtggtgttcgtactgcgggcaacactccgatatcgagccccgggctcttctccatgagacactctcgcatgggaacgccatccgcgtcggacgatgacgtctcgacgcgaagctcacttctccatccgtcacatcttcaaccaccgaaggaaacacacaccgccgaagttgatcgcgacataatcacgggaaacaaaaccatcaatcagtatgaaatccttgaagagctcggacgtggtgaacatggcaaagtgaaactaggccagcatattgcgactaagcagaaagttgccatcaagattgtccagcggtactccacccgccgtcggttaggcaaattgggcaacccagaagacaaagtgaagagggaagtggctattctgaagaaggcgcggcatccaaacgtggtcagcctgctcgaagtcatcgacgatccgaaccgacaaaaggtgtacattgtgctggagtacgttgagaatggcgagattgtctggcgcaagaagggtctacgagaaattgtccacgtcgacaagctacgtcttgagcgggaaaagaatggaattccagacactcccgcttttttggaagagagccaccaattcattcgaacggctcagcatctgcggcggcaacgggaaagggctcgcgaacgcattgaagcacaggctgccgatgcccagcaagggccaatccctgcttggagtttggagcacggtgcggagtcttcagatgaggaggatgacgagtctggtattcccatgaggagaccatctgttgcagtaacagatgactcaagcccatccttcacgcaggacccgtctctaagtgctatcgagggcagcatgtacggcgcatattcagacttcccgatcgaacgacgttccagcacagcctctagtagctttggttatgcaccatctgaacccgagtggtctgcagagggcgatgacatggcattcgttccttgtttgactatcgatgaagcccgcagcgcattccgggactcggtacttggcttagaatatctccactaccaaggtatcatccaccgggatatcaagccggcgaatttactcgtcaccagcactcatcgggtgaagatttctgatttcggtgtttcctacctgggacgcccaatgcgggacgaggaagaagagcaagtgggcgagaccgacgcaacggagttggacgatgcgcgtgaattgtccaagactgttggtactccagccttctatgcccccgaactatgttataccggcgatgatttcgtggagactattgggtcgatccccaagatcactggtgccgtcgacgtttggtcgctcggtgttacattatatggaatgatctttggtcgcctacctttcgtttcggatgatgggtacagcatgttccagaccatcgttaagaaggaagtcttcattccgcggaagcgccttgtgcccgtgatggatgaagcgtccgactctaatcagtggaatctgagaaatgatgatgagctcgtctatgaggatatcgacgatgagctatacgatctgctcatgcgtcttttaaccaaagatccgatcaaaagaatcaccctgaaagagatcaaacaccacccctggacactccacggtcttcccaaccctcgagtctggattgaggagaccgaccctgccttccaaagtaagggtaagcgcattgaggtttcgaatgaagaagtcacaagcgctgtcagcaaagtccctttcattcaacgtgttcgatctaatgtcgccaaatggttcggcagcagccgatcgaaggacaaggaattccgcaagcgcacatcgagcacaacaccgtctaccgagaccctgtcctctgcctcaagtaacagcacatttggaaaaacctcccgcgacagtcatcgcttcagtttgcgaggggacgaggaattcttccggccactcaaatttggcagtcaaggacatccgcttgcccagagcgttactgcaagcccggtggatgaaggtgattgggcatcttattttgacggcgagcaaccagctgcagcaaatcttgctgctgcgactaagcttgccactccacctccacgccgacctggtcctcctcgtcgcgcacggtcttcaatgtccacagcagaatccgcaaagacggttaagccatccagtttcgatactccattgacggttcggccgttttctatcatcgaagccctaggtcctaccaacttgggtagtctttttagtggagctactcgacgggcatcacgaggcagtcatagtcggcgcagttctccgtctggcgagtcggcatctcgacatggggatagagaacgtcgctctgctgagcctagcatcgctgtcagcaatgcatctgcccatggccaagtgcgcacccccggcctgtggcatgaggagaaacactcttctgcccagcaattaacacacaggcgcaagcgatcttcgaagatcgaggatccatcagctgcagaatctctcaatctcacaaggaatgcactcctgcgtcgtagacggagcgatattgatgcaaatgaaggcggtactctaagagttgactacgcgatgtactctactgaatcgctccttctaccacctatcactccagctaccaaccaagggtgtgccgccgacactaacaacgggctggccacttccacctcggccactgtatcttcctcttctgccgacgacttcaccagcggcatgtctcagagtgcctcccaccccagcattccgtcggtcgtctcaaacgcatcgtctctttccggtgacggttactcggtcaagggaaatgacttggacgaagtaccctctatgctccgaaccggggagacactcaaaccccttcgtactcatccgaactcgcccaggtcgtccgaagaggatgagtcgaggtactactgcgatgacgaggacgaggatgagtcggaagatgaaggccttgtgattggaaaatgcaagcctcctcccaaggctgccgcatcgaatattccgtcgcagccatcgaactgaaatgtgaccggtcccgatcgttccagtccagtccatcgttccagtccagtccacctctttacatttgatcctccccgcctaccgcattatcacccaccacttcctccatccctcgacacttccttaatatacctagtgaagttgttgtatatcatcgaatatcgttttgatactctttccgttccggttctcggcaggctgatatctggaaattgttcctagaaattgttccatacattctacatggtctgtacatatacatgaacacacgtggatatccatcgatgcctccctgtgaagggcttactggtgcccaccgaccggctgcgtctgcatgtctcttctgttctgttctgttgagttcagtctctgtgactatgaatctggagggcagagagtcccacagtgcatttcatgggtttctcttttctttctctttccttctgttcttctttcttggtcttatgcatgaatgaggggccagattgctttttattttctaactgtatgtaatgttgactctgtcaaaaccgggcgggttgggttttggtgccatattttggattccttgatcctcgagggactgcagagtttgtctcttgtggaatttgagcaatcgcgacatgacatgactgatatatgatgctgggaggcaagacgtctagcgtgtgatgaagaaatgaaatatttggggttctgggacttttggttgtatccctcccctaagacgaatttgttttccatatattgtagaacaccccttgtacggtagtctccaaccgccaatgccttatatcagatttcctccgagccttttctaagacgtaatggagtttccttccgctttctatggaagatagtgggtggataatgcggaatttgggattagttgcgatgataaaatttccgctgcttggtcgactgacatttgatgaattaagggtttagccatgtcagatttgatacctagctagaaccagaggcttatgcaaggagatctgtgaagttaggcaacagtcaggaaagccaggaaagatcgaatggaatgtacaagtatagacaaggcagactgttgaagtgcgccttggccaatagcttatatcctgcatacctaaataggactagcgcccatgggcctcagctgcgtggctgtgcaaaagctaaagccaagtcttctttagcgctgacccctccactttgggaagatcggggaatgcctcatggcctaatatgtgtatattcaacaggcagcgtcttttttttcatttcaatctctgagaatttgtataaaaatagtctgtgttcgtctatctgttatcagggtggacactgataatgccaatgtggggagagatctgctttaggaggaaacttgtacggagtagaagaaggtgggaattcttccttttactcttcgcgcttagcccccacagggaaatattatcggaatatcatatattaaatcaatcatccctacgagagtcctccgtacagcattggagtctacagcacgcgagttgctatacgacaagacgtgtttgacctagaccgccttgcgcacgtgaaaacgcctgaccttcaactcctccctcatttactctctattgcggacatctcgtcaaactcaaggtatccttgctcttagagatgatgaggcagtctgccgaccgctgacaactagctcagaggctccttcgcgtaccggacccgattctggacccttgcgaatgacatcccactacgtcgtcagacaccattcttcctacatcaccgggcgtccacgaccctgacaggcttgcctgtctaatctgccccgtcgctgaatttctgcgctatattctatccctgctatccctcgtctctgatcacaggttcagcctggccttcgtgaaagagcccccacccacgcgcattcgcaaacatgacctcccatgaccagaaccacggcacggcctattgtccggagcatgaccagaaccacggcgcggtctattgttcggaagatatgaagcatcggagcataagcccttcgccgcacggccaacaatatcacgaccccaaccccggtggattaggagttgacccctcctccatggccgcttattccacaaacctctcctatcagaatcccgacggcagcattggcggtgctgagatatatggatacccaaactaccttaccggggcgcctttgacacagacattatcaccgctggggggccagggctatgctccaaccatcaataccaaccttccgatatcgcagtcgttcgagacaagcctggtcaatcagctcgagcactcttcgacgggaatgagacggatgcagggcgatgaaaacttctccaatatgctcaactccaatcacccagaattggacttctctctctaccagaatcacagccccaacagcgcttccacccccgagtacgattcttcgttattgctagacccgcaaatgcaacagcatcagtctatcaaccaagcgataaaccccgctgatctagtcagccccatctccaatccttctgtatcctcgcatccatcacaagatcagcaacattcctcacctggccccatgtcccctccagggtccacgccgggtgcatactatacccctcggcattcacgacacacttcgcttgacccggctactgcggcgtatttgagcgcccagtcaggtccagactggcagtcggttatgaataatgtttccttccaaggccatcgacgtgcaccgtccgaggtgtccgaagtatcgtcggccagccactccccttatttgtctcagcacgaattcgatggcattgagaacaatgcatcgccttctttgattccccaaaatgatccaaatctttacgacaatggcctaggcatggaatcatttacgttatcggaacagcatcagcaggggatcagtcctctccacagcccatatatctctccgcggttgatgccacaacaggggaatgagatggtgccgaataattcatatctcactcagttcccctctgcgccgacagacatgtacggaatgccccaagaagacatgatgaacatgggccaattgaataacatcccgggcgacattggtcaagcttcacagatggctcctccatcgatcaatgttgagtttgccccgccatcacgagctccaagcttcggcccagccaaatcaacggcagactttgactcactgagccctccggctatgcgtaagtgacgatttacaacagtttgattcgtacgatactaaacagaacttaggatcccgtgttcgtagcaaatctgatccttatcaccctgcttcccgcccacgctctcctgcaacttcagcagcttctctagggccccgcgcacctgccaccccacgatctttgtcccctgttggatcgattggttcgcgcagtagtcccagttcgcgagatccctcgccctcacgatcaaaccgacgcctctccacctcatcaatcgagaaccggaactacatcctagatctcgccgatccacaaaggcccggagcagtacccggggagccaaaaagaattcagaaacacccagctaccttccagtgcaccctatgtccgaaacggtttacccgcgcatacaacctgcgatcccacctccgcacccacaccgacgaacgaccatttgtgtgcacagtatgcggcaaagcattcgcacggcagcacgaccgcaaacgccacgaaggcctccattccggcgaaaagaaattcgtctgccgcggcgagctctcgcgaagcggacaatggggctgcggccgccgcttcgcccgtgcggacgctttgggccgccacttccgctccgaggcgggccgggtatgcatcaagcctcttctggatgaggaatcgcgagagcgtgaccgcgtcttgctagagcaccagcagcaacagcaacaatcgccatccggccatctccagccaatcccccagccgctcgttatgcccaacatgcccggcatggatgggcaatcgacgggcaactttattcttcctgctgctcttctggcgcaatacccggctttgcagacattgcagtgggaccagatttcggctgtgggtgatgatccgagtgatattggtgggcggagtagctttgatgctagctctggtggagaatttggctttgacgaggatgattcggggatgggcggttatggtaataaccaagggggtatgtacggtgtcgataactctggtcagatgctgggggtcaattctggggaccctgggtactctgatcagaagtggactggatgacactggttctgcttgctgtctgttccctccttctttcttcctttcttcttcctattttcttcttttctctttttcctgctattccaggtttcaaaaggttattgcatgatgcattcatctgcacaaagccgattcttttgctttcgatgctgccagtatagaaaaggcttgttggcgttcatatataggatgctctcggagatgtctgaggatttccgaagctcggcaatcaggacatatgattgtcttggtgttttgtttttctttttctggtctttttagacatcggtgtttattatgccgtcttttgggtcgttctccttctattgatctcccgacttcccctttgcaggtggttactattctacccatctcattacttatgaaagaaccgggcatcatgatgctcttttatgatattcccatgctcgtttcatgcccaacttcttttcttccttccttcctttctcttcttctatcatggattctgtctcgtttcgatgtcacagcttcaacactatataccataacatacaatggatggctcaatcgaatgacttgaatctctcggtttagtacttatttactactataccaacttggttttgcacttccactccagtgaaccaggaaacagtagaatacagatcacattggatatcatctagtcggcaaaacaaatataaaaccatcaaaattcatcatatacaaggtgagaggactacaatatgtactccaaccaaatcatcaactccagatcgaacccaacccatttttatggtgtcaaaacagtctgcaatccacctccacctgctccactctctctttaagagtgagccttcttagccaacaggttcaaggcactaccagcaaggatgaatccacactgatcctgactgaaagtatgctgaacagggacctcgaacacctccccagtcttctgcttagtgacacgcagcttgatctcaccctgtccaccagtctgcagcacatcgtaaagaccaacagtatcaaccttatcacaagcatcgatacggtcatagtcctcacggtttgtgaaggtaagaggcacaacaccctgcttcttaaggttcgtctcgtggatgcgggcaaagctcttagcaacaataacccggccgccgaggtagcgcggctgcagcgcagcgtgctcacgcgcagagccctcgccgtagttatcctccgcaacaacgagccacgaaattccgcgctccttccatgcctctgctagctccgggatcccgtattgcttgccggcttcgtcgtaggcaacgttcgtctcgccggttgcggcgttgacggcgccgatcagggtgttcgccgagatgttgggcaggtggcccttgtacttcagccatgggcctgccgcggagatcgtgtcggttgtgcactggcccttgactttgtataggacctgcaggccggagagatcgcccttggggaagggggcgaagggctcgaggagggcgaggcggtcggaggtcggtgagacaatgacttcgctgcttgcgtctgggacggcggctgtggggaggaagttggggttgccttcttcgaaaccggcgctggggaggtcgaagccgctggggggctggaacttgaaggccgagccgtctggtgcggtcagggagtcggtcatagggttgaaggttgtgctgccggagtaggcgagcgcggtaacgagttccggtgaggcgaggaagttcattgttcggcggttgccatcgttgcggccggggaagttgcggttgtaggaggtgaagatggcgttatcttcgccattggggacgccgtcagtgcgcttccattggccgatgcaggggccgcaggcgttggcgaggacgatgccgccggcttcggagaaggtgtttagtgtttgatcgcggtcgagagtggcgcggatctgttcactgccgggggtgatgaagaaatccgccttgggcttgaggcctgctgcagtggcctgcttgacgagatcctcggcgcgggtcatgtcttcgtacgaggagttggtacagctaccgatgaggccggcaccgaaggtctcgggccacttcttctcgcggacggtgtcggcaaacttggacagcggcaccgagaagtcgggagtgaagggaccgttgatgtgcggctcgagctcggataggttgatggtgaccacctggtcatactcggccttggtgtcggcgcgcagcaagctcgaggggccggcggaggcaacctcggtagcagcatctgcgacgtaaccgcggtgggtggactgcaggtagggaaccatactaggcgagaaggggaagatcgatgtggtagcgcccacctcagcacccatgttacagcaggtagccatacccgtgcagctcagggtctcgacaccagggccgtgatactcaatgatgtagccagtaccaccgcgaacggtcagcttgccagctagggatagaatgatatccttaggcgaagcccatccgctgagcttgccctcgagacgaacaccgagaaccttaggagccttcagctcccaaggggcatcaaccaacgcatcaaccgcatcggcaccaccaacaccgatggcaatagcaccaagaccacctccgttaggagtgtggctgtccgtaccgagcatcatcaatccaggggcggcgtagttctctagcacactctggtggatgataccggcacccgggggccagaactcaataccgtagcgcttggcggcactctccaagaagtcgaatacctcactgttacccttgattgaagccggcaaatcggtatcggcaccacgctcgccgacaatcatatggtcgcagtggatactggccgggacggcggtggagggaagaccgcaggacatgaattggagcagagccatctgggccgaagcatcctgcatagcgacgcggtcgggcttcagcttcaggttggccttgcctcgaatgtcgcggccgttgttggtcccggtgagcaatgactcctcggcattgtccagatgcgcgtagaggatcttctcggcgagggtgagggcgcggtcggagccaagaactcggcggacatgttcaaggttgcggacaagcttgggatatgggggcatgcgggaggaggaggcctcggtggctaggccacgggcgaagagccgttgtgatgaaagccgtgtggccatctataaggtgttagattgttcaattgagattgtcttcgatgtatacataccccacgagaggcagaaacccgctgccaaactagctggctcaccatcttcactaatgttaagtttggggagaaactggggagaagataagaatgttccctttttttttcgtccggttgttatttgtatccgctgtgattggccggtgattgcgccgatttcggaatccaggcctctattatgtggggaaatagccctaaagaacttgtatctacggagtactccgtgaccatactggcgctactatgcatgtatgccatcatataagatgtcattattgcttcttcttcaaagaaaaagagcggtaccacctttcggctgcacctgtttagggctaaatcttattctcgatacgtggcggaatacggtctcccgaattctccttccatgtccaccattttcctagttttagcatcgttcggttttctactactcgctgtgagtgctaagctcaacattctccagaaggacaaagccaccgagcctcaggcaggcgagatgcaaccctccgaggaacttccgacttatcaagagatcgcaaagtctcccgagaaatcctccgagaaagatttgctgtataaaacaaaaaatgcccagaagcctgaagaccttcttgtccacttgctttcaaccgaattgaatattgacgacaaaaaaactcttattcggaacgccccgagtcgtatatatgacagcgaccatcaccgccaaaatgccgagaaggttgaagctcagcttaaagacgcaggctacagccagcttgccatagtgctatattggtgtttcttttggcatggggtacagctgagggggccagaaagctggatcaaggaactgattgaaaatgatatcgagaggcgttggattgctcaaagaagggcccgcattcaagaaaaagtccaaaccttggaaacctcatcagatctacttctatcttctgaaggtgaggctgaacatgcctcacaactcgagttctacaaaggactgctccaggatctcaatagaagtcattgggctctttccagaaagagttggaacaaacgagaatccataaagagttggtcattcagtcgagcatataatatacaaagatcctatccagattggtatctctctacttcgttgagcgatgattgcgcaggacgaggcggctgttgcgggcggagctgcggctgctgtgaaaggccgcggacggttgatggattcgaagatcatatcggcaccagaggccattgtactacagcctgcagttgctgcatgaaggcccatggggttgaagacttggatgacttgttagttgaagagataccagacttggaagagctttgttttgagtacaagaagccctcttgtatgacacatcagagcctacggctgctgatgggttatgctttcaatttacccaaggcggaatgaagttaacagatttacaactagaatatgaggacctgtgaaaatgacgccgaaaataaccccttttggcgccagaaacggccgtctttccacccgtaactttggagggcgagcgggcgctttaccgcccaccgtccagtacgatcactattttgcacctaaaacttgtgtcgcgcttattgccccacccaaacagctccagcgcgtccctactatctagtgcgtccttatgtatcgtccagtacgtccctactctccaatgtgtccctactctgccactcctgcaggatcgtagacggctcgccgctctattcagggcactcagggcggatattcacccacctaagtatccttcaccacctgcatctgtacagcaaaggtacattttccaccatggccaaaaagttacaagcagccttctttccccctatatcttcatcactctaacctcgctttatcacaagcaagatgctttccaaacatgacccaatgttgaaatatgtgatcaatgttgggggtttcgggggaagcatagtaattatgaaatttagcggacagtgtttccacgcatggaatctcgttacagtcacaagctagttagtacacaattgccaccgaaacagctagacgccaccgtaaatgtacttgcggcggccgacgatccccgacaggtccgtacgaatctctgcccatgctcgcccacccgctgccggctgtcaatttaaccgtgccggtggccctcactttgaagtcttctaatgtatgcgccaactgcaaggcttgcaaggcttgcaaggattgatgtgataagtctccgccacgctgtcactactgtcctggtcgtcacggtcaagaaagcatttccaccttcagtaagcctgcgaaatacgtccatagaagccggcacgaggccagacacgcctcaaaaaaatgcctgtatttggaaccctggtataaaattccctaaggactctgggcaggatctgaagatattcttacgagcataccgtgctccttgtagggttattctagggtttctactgaacagaagaggctattgttcgcgaggccaagtgggctcgacagcgacagcgacaggcgatacaagctaaattatacgttcaagctgaagtcaccagaacgacagcataaatgaattgaaggagataggtcaagatctccaatcccttgagaatatttccgaggcatcgtcacctctactaatgactttatgctgcacttcgtctggagcagcaatcaaaccggctttacctgaatgcggccagtattacaaagatatcttccatcattaaatagcaaacactcataagatattgagattgaacctggagtttagtctatattttacaaaatccctcctccaaatcctttatacctagatgaagggcaaggacccgccggatttcacaccaaatgcccttccgtgcacttataacagcatcttgacgctctgttgcaagattgtaatggtatttttgtgccacgttgtctgagatgaagtgtaaatacccgaataaaatattgtgttcctggcaggcttgtgccaggtaaccgacctcgcagtcgacccagtccgctctatgcttattcttggccagccaatcctcattctcaaccaatgggcttggaacggtaacatgaatcccctggcaaatgtgggccatatgccctgctgatagggtggccgtgagtggacttttccaagagagagttttgttgttgaggagacttgtttcaccagtaacgagggcctggtttggaatatcttgtgttcgtaatgaaccagcctttcccacatatagaacgctggatatattgttctggtcttgcattgtgcgaacaacatttccgatgatatcaccccagaggctcatcatgcttccgacaaaagcgatgatactcccgtcagctcgacggaagtgcttccacgcaaataactgattcggctgatgtgtccctgtctcccaggggtaatcatgattggtgaccagttgatcaacataccctaggatgacagtatcaacaggacacataaaccgtaaattcgatttcgagagaagatccaggcaatcttccgaagaagggagtcgatattgtatcactgatgtaggcgcattaatcgagtttaggttgagataataagcgactaggagggcgtaatgcaggacgtagtctcgccccggaaaacacctaacctccagagtcgagtcgtcgatgatcactgctgttggtcgatgccagttgaaacgtttttctcgtttctcagtgggcgaaatatgtacattggggccgtttcggtcataatggccacagactacaatgtgaggccagacacgggtcttgatcaacgggtggatcttgccatcaacgtatgtctgaagagtttcgtgcatcagattttcgcctgccagaagcgagtcatggtctattcttcccacggtcatgctttggttccagccgagaatccaacgggcgagttggactgagacgagtgttgagaaccggattaagtttatcccgctcttagtttgtttactgtacaagaaatgcttgcgggcttataacatcgcctaaattgggctacttgttgtcttttgctcttcaaacttttttctggggcaaatagaatactcccatttagatatagtctatccattgatctcttttgaggcgctgataaatgtcagtgttatgatttattaatcttacatgatttgtaactaactagttaactaacgtattcggtaaacgagctgcgcaccccaaaacactatagtaaatgcaatatattccacatttatatctcaacaaccacgtctcaacttgctttcattacttatcgatagtcatcgataaggattcttagcaatatatctcaatttcaaataaatcagaaagttgcatcattgcggtattgaaaattacatcactgaactataggagatatatatatctcaatcactattatatcaaatttctcaaggctccctagagtgatcagatatcatatggagagtaatgggctacaagataaagtttatattgaccaccgttgttgcaatatcatgttgtaatttatcgcatttactatgtgttttggggtggccgactcgcttgggaaatacgttatggggcttacagctgactaatgacaaaacataaacatggtggagcattctcggtaatttacctccacaatacaccatccgtctgctatctccaggtcagctatcggtatctctctctcttcctctctattcctactcccgtcggcttcgcttggaatctaatacctttcagccggaatcagacagttctcctggtttcaggcatcttgatgtctgtctctctttggcccaatgtaaatttcatcgtttttctgcgaacagtctttcttgaggacgggatctatataaaccgacctaaaaggatcagaccttaacatctccaggattttctatgtcatgcgagtaaaatctttgagaacgtgttcaaatgtttcggggaactcttgctaattgtatgtgcaatttctcacgccatcttttatactgtccaacaatcaaacatggtcgacccttctatagagaggaaccataccaaagtgtacattgttacggtgtcgagcgcaaagtagtacgccgggagagccaaaatttccacggaagccctattgaccgttccaaagatcctaagttatcagagtcaatattctcggatgttctgcttcggcagaaaatgccacctatgagggcttgcatgcgccagatccaagcatgcaagttgaactccagcatgaaaacaaagaagccgagtatggttatggggattgtgcaaacgaagaagatccagatttttggatgtgtcttccactgtagagtctgggttttttcgttctcgtcgagtgtgaagaaattcattccgaaaaatccctacaaatattttcagcatgtctcgtggtcaaattctagatataagggtcttactgagatgaaagttcccggcaggaatagaagcgttaaggcggacacggtatcggacaagactttgccttcattccgagtttgcttgagaatgcctttcgagatgttgctattggcaacagtgacgaagttggaggcctattgaactctgttaactgcctttactttaaagaagaagacgaagaagcacaaatggtagccattcttctttcgcaggaggcactaacacatttgatctcattatccatgcgacccacaaacgccttagcccggaaattcaaatttgtgatcatgttttgatacaataacagcgcttttgaaagttgtgttgttgctgcagaggaagggaaggttgactggatccacacaccatggtctcgtacgatggcaccaaggttattagaggtcgcatccatggactcagaaatatggatcacatgtcgcgataattcatgaagccgactgtatcgtttgacaaggaactcgaatgtttcatcgttatcgaatgatccagttttcataaacaggtcctgaccgcgaccctaggatttgttagatattcatctcgtatataacattgggaaatggcaataccttctctatatctcggaccggcttttggaagctccagagatcatcctcacactgctctatcacgatattgagtgcatacttgagcatgagaaagggttcgttgttccagtttctgaaatcggttttatgcagcagacgtcttagccggagggtaatatcatcatcaagatcgaagcaaagtagcacattggtctcgtcggtagatccatccgtcctcacttggccactgtctccagtagggttgataagtgatgaccgccatagggtacagaatgccatatagtgccaggcgtactcaaaatcaggcgcaggggtggagagagggtttgtattactagaattccctggattcaatgtcctttcagcgccctttcccttgactcgtttggaaagaaagcgcgaaaatgtccctttgtgagcgttcctgttagcaatttttggtggctatgataagctctacgtttttcttcttaccatagctcgtttctgagtcgttttgtaagaaattgacagtactgccgaacaagccatttgcgttccagcccagtctttcaaaaaagaagttaggaaggaagaacttttcagtcaactgcctgcataaatctgcactccctgccatcttcaatatcccttcttccacttttggcatgaagctgagatacataagcaagcgtagaatctaactgagatgtggttctcacataacatgaatacctggctttctcaagaactatatgatacctattagcaagttaccatgatacatttgtttttttccctctgactgacatctttttgcaaaagttcagtccggcttagttcctgaggctttggcagactttcgtctcccggtagggatggttgcggcgggctagcagttgtctcactgcctaaaggctctatccatcgccagtagctgatatttgttgagtgatttactgacatttctgaagaaagtcatggaatgttgttctcgaaatttggcatcgggagtggtggggaataaataaccacgctcccatttcagcccccacacattgcgttcgagggcggcacagcgcatgaagctatctgcgagttcgttggctggggggcgtaattctagtgcagattgcttctcgactcaacacccatcatctgaggggtcagtttgcggtcgcctggcggcagatccttaccctatacatttctttttttctaaattataattctgaagggtcggaccgcaaaagtttccgcgaaccagccccatcgccaaaatatatatttcaacccacatgcttgaaacattaactagacataattgttaaatagccaccatatttaaatgtaaaatttaatattctatatatcaccctttagacgcaatgttcaatcattgaagatagtgggtgtaattgcgcaaaggcggtatggagaaatttccgcggaaacctatgcggcagaactacccctctgagccaccccagccaggcaacaatggaggattcaaatgagccgtaacaaggaagagtgaactctgtatgaattgctttccaagctaaagcaagcttgtcaccatttcgctttcttaattaattacttacttattttggaaaatggccctggtatcacggactgctgaaaattttgttatcattagcgaaacgaaattcaggaggtaaacaagacaaatagcaactaacagactgcaaggtttctaattcagtatacgagttcggaatcataccagttcccaaggacgatctttgttcaaatcggagtgagctcggtggctgggaagcaggaatcatatggagtatcggtgtgagaatggcgaggggggggatttgagcgttgggttgcggacagggttgcaagagcaatcggctcacctacctttcgagagatgcaggtgaccatacgacatctcagctgaaggatcggcgcaccacttcttttttttggtctgagaacttggccattgaccttgattttctttttccaaggtttccaacaccttgtgaatttgaatttctcgaatcagctttgacataacatgcatgtttgcctgcagtatggtaatgtaactccgcacgcttggccacatttcaggggtgataactgagtacaatggttgaacacgaagcaatcttgttgatctttacacggagtactctgtggtatcgttacactggagcacgcaatttcagctgcagcctaatttacaccctctgagcctcaggagaaaggtctatcaatgttcaaggcctgtctccccatagagctctatagagctattggagatccagcagtcttctacaacaaatgcagataccactataacgccgggaagcatccaacgcatacggtatctcacctcgcagccccattcttaatttagacaatgagagaaaaattactgattggggtttattctgtcgccgccatcttatccgcactttaacagacaattgatttacgattcaacacagcggttttggcaccgggacagcttagggcgtaaatgggtagggcgtagagacgaccgtttcttaaattccaccgatggacgtctattacgactgatcgtgcagtcgacaaccagtgtgaagttacctggcgtcgagacatccttatcgatggcatccccgccatcctgaaagtcatgttctgggctttagggcctcgcagtaaaaaaaaaaacgtgacatcaagcaccccattacacggtggagctacgtccagcacttccttaattcgaaagaatcactcaagggcgcaagtggaaattcggttcaaatacccagtcggcgctgtcataattcttgttttggtttgtctcccatattattaacttattattgtatctttagtatgttgacacctgctaaatagctatttttttcttacggatcttgctggggagccaagatacaacggtcaatatgagccgtttagatatcattactggggctacacgcccatttcaagcaatccctatgaatgtccaacactgccagaaaaccctgatccagcgcatgagcaacgcaatcctacctctgaacgtcttgaaagaccgcaatttctgtgtttcctacgcgaaacatatagtagcaacaccttgaaggtcagtaactgggagaaaaaacatagagacacaaagacactacagtatatctttattgcgtacacaaccatacaattctcgcatgaccagaagcgcgatgacatggaagttctacattctattgcggagaaggcagctcgtcgtgcaggagttcaagtctattggcttgcatgcagctgtatgcctgaagacaaatacctggcggacgacgtatatcggatcagcgatgtagtacgtggcgcacattcgctcgtcaatgccgttggaccacctggtcaaggccatgaatcccgggtttacaccacgcgagagcttctcaaagaatggggtcggcgaatgtgggcatttcccgaggtccttctatcgccaaatacgcatccgatattgatttacacccacggcacatccgagggagaaccttggcagaaacccaaaagcaaatttccttcagaggcgtgggttgacgcctcaaactcacgccaactggtcggtcattacgaaggctccatcatgttgagtcctctagagcttgtgacaattgcattccagtgcctatcgactaggcccttgaaagaagaaagcgaagcagatatagcatatgtctttatgggacttctgagacgcaggcccagagtcaatcttagcgacagcgcctttcaatctttctcgcgtctttcaatcagtaatgatagcgataaattgcttgaaaggcttatatgtctgcttcccaaatcaaccaagcggaaatggtatgtcatcgacgacatatgggatcgcaatttatgggatgttgaccccttctgtccagtcgtcggtgtctgcctaggagattcggttgttctcagtggggcatttggagcctctattcgatggaaataattcaaatctgtgagcctgacccataggaacacagttggagggttaatcacaactttggcactgcgcgccgcacctgtgtggttaatcgtctcagcaggcttactgtctgctagtcaaactacagggtggaagatgatggtgggaatttacgcgccacttcggcatctaaagcattccaaacagccagctggatttttatgggcatcactatccttcttggcgctctttctcccttgatggtatactcgctttatgcaggcaaaacttggtctgctcaaccctggctcttcggattcgaaggctacctgcccacccacgagattgaagctcttgttattgtagtcaacatgaaccgtttggcttggactgggtacagcagtcaactatcgcgccactgtatggttgacggagagtgtattgggagaaaccctacggaagacccgaaagtcaagcgcatagttgattccagtgcttacgctacgtacgaggaaccaaaggttttcacgttggtcgacatgtttacaatgacggtaacactatttcaagccgtgaggccgccggtgtctctgctcctctgtggaagcgagggtggtatgcaccgcggtctactctgttcctgtgactggcccacataaagactcactcgggagagtgtcttacgagtcgacactcggatgcttgacaaaatggcccgagttggccgaattcgcattggactggagaaaagcctgcatgatacctccccaatgtatgcgtttgtgaacaatgatgcgaatccaacctgatgatttaatgtacgattatatgataggaacgtggtatatacaatatttaacgcgtgtcatacccatgtagaaatggtccttctccggaaatccagatggctctggtggtgagattcgagtttcttgatcgtgtagttgattctggtcacctcctaatcatattctgacgggtttcacgcatatccgcgagggagggcaacactaacctctgctagtatctatgtgtttctactttgaaaccctggataacccatataatatctgccttgctatttatgggaacaattgccattctatcactttctatttacctgtcggtgcgcttcgactggtcgctctgcttcctatgtgtgctttattgaccaaaaaaggtagaataaccgcaacaatttattttcatcatttataatcgtcgctttagctagtctcagcttcgttcatgcccaatataattagggcctgggtcatatgtatgaggccatggcatatgcaaacatgtactttcaaataattttggcagtatccgcgcctcacggctgccaggaaccaacgagtcttgtgggtggtatccattggctcaatagggttgttccttgtttcattaggtttgactattgtaggattatcgacacgaaagaacaggatgctataccatcccagtggctacgcttctagatgataggcattgcaagctggatgtcagatcgagcggcatatccggtaaaaatgaaagaggcagtgcgtcgggctgaaagcaaatgcgcagtagtcggtggggaccagaataaaagaagggggcggcgatgagtgcaagatataggggtaggaagaatgaaaaagtgagagagtgagagagtgggaggaagagcagcgaagacgggtcttttatgtcgggagcattgaagggaggttacgtgacagcgtattggggcgctaaacccagaaaggcaaaactaaccgcatatggtagttcacaggtccgccgtttacaagttggattcactgcgaaatcaccgactggttcttttgttggatgacattgctacaattatgtcaaacctgtctattgctttagttgttcctattattgctgttatgctggttctggttgcaatccaagattagctgttatgattgacaactccttaagcggccgcaacccaaaacggtcgttgaaattattgaaattgttgacgatgtcctttccagagacggagctattacaagatgatgatttttcaatcctcaaatctgctaccaactctcagtcctcggaacacctgccagttatgaagagaccacgcaagactaagcctcgacggtaaatgcaagattatagaactagcacatctcgattatatctctttgcgaagataaagaggctggattggttgaaaatgcacttcggcttcagggcttgtataagcttgcccaagcggtgtgctatcattctcatatcaaacgaggctcacaagacatgacttgatccgattgatgttgatattgaaacacgctggattgtccaacgaatgatttgggtccatgaacagacacctttcatcccgggagcaagggctcaaaattctgaaactggcgaacccatagggatgtggatgctgcgagaggactgaggtcaatacagacggggcccgtgcccgggaccactgtaccacagcatgcagttgctgcctcgatgctcacgggattgacggtgaagttctggagatggaagacgtggatgaagttgacttcacagatcttgatccccattctctacggctgctcaagggaacgggatggaatgaatagtaaagcgggtgcttctgctagaaatattaaagtggggctttgtcttatcttcgcaaaggtcggaggtgtagctagaataacatgattgccaaattagctttttcatgtgctttcttagttgaaagcaagagacaacaaacaagaatcgttcgttaacagggaaattccattaaactcgaagtaaaaccaccagaggacaccgaagtgccctcgttcccaagacaaatgccaatgccataccatctcgaacgcctatcgtcacataaagaaaaagaagagaaaacaaggtaagactctgatcatacaatcaaagaccactgtatgccaaagacattccatggccaattcttcatcaaaatcggcgcaaattcacaaacatcgatggaaataaaacacataggtagagaaaaaaaggcattggtctaaagaacctgttgttttaagactctccttcctcgccaaccacagcggcacggagctcccaaaccaaatcgtagcattcggctagcagattattgacacagccctgtccctctgggatatctggacccacgtagaatttcccgtcaactcgcatgttgtcaatcgagttgagctgtttttgttagctttatacgcaagcagcgtggacggttacataccttcatgctgtatgggtaaagttcgcgtgaatttgcaacacccccagactccttgacttcaatcaagcaccggcggagagtttgaagttggttgtagactgggagtaaagcttcagataccggctctgatgaaatcaaaagcgcatagatgtatgcataactgcgacgaatgaggtatagaagcgtctgatcatgttagccagaatccaccaaagaatgcccgaaaataaaatcttactcgctgcgcatgcaggtccgccggctgaccctcagcatcgatgaaatttccattaacccgtgcctcgtcaattcggtcgagctttcgctggtatacgaagagatcggtctcgcgcagcgaccaagcttgtgttacagacaaacgatccagttggttgcggatgtccaacaatcgttcgtattgatctcggaaccgctcatcaattttgccctctctgtatttgaatcagtcgatgtctgtcatcccgttggcagcctagaacataccgctcaagcacaatttcagtccatcgccaacacctgtgaatcaaagacttgacattttcctgcccggcaagaacatttccctcgtcgtcaacaaagttgccgtcctttgccgtcttttcaattttcttcagttgttctcgaagagaatttacctccgcagccgagaactagcaattaacagtgagttagtactaatcagatgggttatagaattgttcgatgccatacttttgaccgagtgttgacagctgatgtagaccgcagaattgagaccagtgtctcgtgtgtctgcaccaaggaaggagccaatacagcaagacccttctgcaacttcgccagtgactggtcacagtgttccagacggctttccaaaagcgtgaggagagcgggtgagtatgtgtttcggccacgctcgagagtttcccgtgtagactctagtgtcttggtgatcgagttcaagtccttcgagctataaaatccagcctcttcaaggtggtcgagtaaacgctgcaagatcgtcagtacccagcgcgcaaagctaacgagagccgaaggagattataggagtcaatacctggatagtagtcgccaaggagtatctggcaaaatgtcagtcactgtcacaagatggcggggtaataacattatcgctcacactgcgggagcttcgttgttcttcccaactgtcaagaacagtagggaaatcaactgaaagcaatcatccaagatataatccactatcattgaacgtcagtcacctccaagtcgagcgcaaggtctactaaactcacggcgattgtgtaccaagcggcgatcttgctctttacgaacggaattgagtttctcgacttctgcgatcacttcctcataaagcggtaggacatcgcgagactttacatatgaggacttatcccgcttgattaggagcagcgcgtcgcgggtccggagcaggttttcaaggatgggctgctcccgcggatccagcgggaccgggatggcgggggactccatggttagagaatgcgatattatcagtgggcacgttggaaaaagcaaggttgagaacaggttggataaaagaacaagtttctttcaaggtgaagacaagtacaactaccgggatgtgatgtcaattaatgaatggatcgattgatagggggatcatgcagatacgaaacgccccgcgcggtttactgggggattatgtcatctagatcattatgtcatctgggctcagctccgcttgcggcttagcgccaagtcacgaggaggagaataagctaaaccagattagtccaagccctaagcgagggctttttcccacacacggcgcgtttgcccggttcgggtgtctatcattggcgttctactctcttcttctttcccatccccaactctcttcaagacacccagtccggtcaacaccacccgtcgacatgtctaccgccgagctcgcctgctcctacgccgccctcatcttggccgatgacggtattgaggtctccgtacgtatccaaaattccttgattttggtgggatagtggaggcttgaagatcgcacttgaagctttatgtactgtgcgaatttgagcttcgggagagacacaacgagacgccgcgaaaccactaggatcaaacaacaatcatgcgaaaactgtgactgaccttgaatcatcatttaggccgacaagatccagactctcatcactgccgccaaggttcaggaggttgagcccatctgggcctccatcttcgcccgggtaaatacctgattcctttccacaacccgcgccaatattgaagcaactcgaaaatggccgcgcgcgacaatttaagatgcgataactaattcgatttccaacacaggccctcgagggtaaggacatcaaggatctcctgaccaacgtcggttccgctggccccgctgccgctgcccccgctggtggtgccgctgctgccgcccccgctgaggccaaggctgaggagaaggaggagggtaagttttgatatacacctctggttttgagctcagtactaatccccactacagagaaggaggagtccgatgaggacatgggcttcggtctcttcgactaagcgtcttatcttcatatcgaatttaaaaactcgtttccttttttctctattcctcaacctcttttcccactgccgcatagcggctccctcgacgattctttattgtactcgatactccacgaaccccgctacgacctagaacccggggaagaaaaaaagaaaattagcaaaagaattcaaacggacacggacattcaatggagactgggtgctcggtgtgcctccgcgtcatgatgtggccgaggtagactggatcggataccgctgcgattccgaaactattgttgcttccatgattttaggggaattgaagacagacgtttggcacacttgttggtttgtccatgatcaaagttttgctttggtctggcgagtagatgtatggttcgttttctcgccctccacatggatcagctcgattttcttggtcctcgtgttacgtctgtctgcgaccatgaaccaacaacgaaggccgtctgattcttatctggggtacttgttcgtaggccatgcgacgtagttctgtagcgctgatcgccggtgttggatatgtttcaggtgtttcgatctcgaggtagtctttcattgagcgcaccaagcccttgcggtcatcgctcagcagactagagtccacatcgacgatacaaagtacgaagtataacatgcctagactttgagaatatcactctatctgtgttcctccataatatcatagtcgttccaggattgcgctattgcgagtaacatacccttagtattgatgtacattgatttgacactagcaaccatacgtgaatatatcgcatcagtcaccagtccactattaaaacaaacgctatgctattccaaacttttttgatgtccagcatcaccaacgaacgcatgcaaatcatcttccatccaaagacttttgagcttgaaaccaaattttagatttgacggtatatagaggtcattgctctagacgaaacagtcaaatgtgagcaaatgtcaatatttaggagatcgccgagagatgagggtcttgaacagcgtagatccggaattggaagaagatgacggcatcctcaacaatagttcccagcgatccaataagccaaggaagattggtgaggaaatactctttctctgtagaatggcaaagaatctatatgaacaccattagcttatgtccagtttatagtacaacgtgtagtatcactcactcctgcaccgtaagtcaggtttcccataagagagagaataaagaacaagagcgacaaccctagatcaaagtcaataccggcctgatacgtgcatgtgaagacagtgaaaaaataccttcgcacgacttctcgctccagttcttatagatctgaggcaatctcgctctggaatcaaagtcaataccaactcatcagccataacggcaggagacactcaccccagatagcacacggcgctgaaataccccagcagcagccccccaacagcctcctcagaaccattgttattatccaaaggcgccggcgcccacatcccggtctgccaagccatggtccaaccagtcgcaccaatgaggaaaattccaacaacactagtaaaattcttgatccatgccttgcggccataatcattctcctcgacgatcttggccagggtatcctcgacctcactctcgcgccggccaccagtgtgataccggcgcagtgagcccgacgaccggcgccgcgacgcgatagattcgctgaatcgccgccccagcaacggggtagtcggctccacagagacggtggacgagcgtcggcggtggagaggctcgggacgcgagttgcgcactttatagtacaaacattgcgcgatgagcacgccgtctgccatacagaagtataccgcgatcgcaacgatcacgggcacaagcccggctagtaggccaccagcaaggtttgcgacatcgccgacgaaccaaacaaagaggaagaggagagatatagcctctgagttgccattgcgataattctcaattagttgaggtacctgaaacagtattgttagatatggattgtgtccactttggatttcgaggtgcgagtctggttgctaaacataccaaaaggaaaaaccagcaggtcatagagactgagcccaagagaccagatgcagcctcacgggctgttaaaggtatagggccttgttccatgctgtctatgctctgcgacaaatgtgtgttggagtgaaagaaaattgcgcgggagataaggccatgacacaatctactcctggccagagtcccgccgtgtccaggccttaagggtctaagcacatatagccctggcggaaatctcttgacatatgttaatatactaaagtatgtgtattctggaataatctctttaaactagaagcatgttaattgactgaatttattattgcgggatgtgcatcagccaagcatattgggggatttctacagccaatgatacacttcattatggtaatacatatgtgctacatagttatgtaccggataatatctggcactcgagacctttccctttccgttttagtgctcacctctcgtcgcttttttatcactaagtaaaactgagcgcgtccctgagtaccgatccacttactaatcattatctgagcaccctgatttgctcactgagcgctctgagtatacggctgcgcggcctaagtaagctacatcaataaaatgcgatacgctaatcctatcacatgcaaccctttccatttagatcgcctatcaaaataggactggcgcagtcaacatggccgttcatcctagcggtctcgaccctatctactgtgccacgcgatcaagtttaccggctatgctgggctccttgatctccttcttcttcgacaactattgatataacattctcccgtcggcttacgggaagtaaccctggaatgaatactataaggccgtccattcctcgtttgtccgccttgcttcgaaagaaaccgtttcccatgccttctctagggctacctttaccgcccggcatagtcgttaataaagagatctcgccggtatacgattctaagtacttctacgcagtaaagcctagagaggtactcgctgatcgttaccaaaccctggttaaggttggctaggcgtatctttaatagtatagctcgcgcgtgatttacaagggtagccttcaataatttctgtttaattcgaagctctctctatctctaacaaatatataggcatatcgaaaagccagagagcgtcgtggtactaagaatcgccaataataatacgagttccactggtcataagcgtagggttaaagagtccatttctaccgcagacccgtcataccgcggccgctcacttatccgaacatctttagactcttttgaagttaaaggttcagaagtttcttattcgtgtcttgtgtatacgcctatgagggagccattgtccatgtatcagcggcgcttcgacgatagaaagatgccactgcccctccttaaaacatacattcgtgctcttcttacggggcttgattatcttcataaagaatgcagattagcttatacgggtaagttcatccttggccttacgtcccgtcggtgatactaagcccgggcggcggtccaccccctccagaggtcatacaaaggtatcaatatatgcgagagtactcgtggcctggctgattgtcgggcacgtacactcatgttcttcatttttcgtgatgatctggttccgcctgaaagggtcttaccgaacactttactccgaggtggggaaaggagttccatacagtcttttgtatggtatgcctactccgtagtaaaggtacatatacatatgggcgatccctttcctcatttgcttggccccactgtatagtgttcgggtgctatggatatcaatccgagcttgtaacatcttacgctagtgcttgcaaggatttcgggtttccaaggtattgatgtacatggctattgcagaatacgtttgattcatagagtattgatcccttagactactatccatcttgaagctcccattactacttcagaacatgccatgaagtctcccttctcagtcctttttgccctcagccttgccctagggcaggctgcagcctatctcattaccccagacggcactcgctccccgggtagtaccgaagattacagttcttagatcgcgtacattaatatactacctgcgagttatgaagggatctatggtatcactgcggcggagtttgagaattgggtaagacgaacactggttgaactttgttgaaacattcactgaggcttctctgtcaaccccaatttataaccaagactggatcggactgtgaaatgctccctggtctgtactattgtgtgcagatcgattatatctacgatacaactactgtgggatttttttcagcgccagtaactgcaagctctaccgcgtcagtgtccctctctagcagccctgcgtctgtgactttgaattctacctcgagcaccatttcgtctttcttgacctcgctctcagccgcagctccgtctgtgacctcgacttcctctccctcgagtcaatgttcgaatttaaaatgtgatagtgaagtcaaggggcaagagaatatttgcagtcggtgcttaagcaatacaataaagtcgaaaaaaatagttaacgtgttgagttcagtggaatttccaacatagcccagggccatgctataaatgttactacaatctcattgttgtacataggatcatccaattattttctatgtacccagactaacacagagtgctaatcatgaagctgaattattctcctcgcataatcgcgagttcgtcctcgagcatgctgaccgcaaaatccccaagagagtccttgatagtgctgtctaacaatcgtcggcgagctgtttctgtgattgccgccatggcctctagataattcgtcaaaggtgcatagtccacaactacctcgctccaattgcctctatcgactccgtattgagaaaggaaaatacgaagagtttgcagaccctcgcgcgtgagccacccttcaagggccgccggatctctgagtggtgggcgtgagtgtgggatatcgaagtgctctgtatcctcgtcttcatcctcgaaaccaattggctcttcctcgtccgatgggacattgggagggcgggcgtcgtggttgatctggccaaggagatcctgcagccaattttcgccaccaccagcaggggctgcatataatggtgtaggttcagattgttgtttataggcttcggattcatagggagggagagggtcggaggatgatagtcggccagccacaaagtggtttggaagatgggttgtcactttggctatatcggacaagaccacatgacgagcgatgtccaaagtgatctctggtgggtcattgggctcctcgccagagatagaatctgcgacttccataatgagagaaatagcctcgggagtgttccaaaggtccttagcgcgggcgatgtagagttcggtaagcagctcatgagcgcctgtaggaggcatcttgccccatatttgcttggggacgtgctgaacatcaagttcctgtgctagcctgctgaatatccacgggtagcgggacatggcaagatgcagctgtcggcgacattcttggggcttattcaaccggaggtacgccattaccagggagcattgaatattggggaggttggcccagtcgcgactgaaccgtgtctgggtgcagagctgcacaaattgtgcatattctctacctcggagcgcgaggtggtcgatgagcaatctcatgcagtaaggatcgctgtcatccagactgagcaagagcttggcccattcataagcggttctccatgtgcccttcattgctaggttggtgatgtacctccacccaaccagccagagctctcggttctccgcatgcatgaaatcaagtctggcctcaccttccttgaggcgattggcaaacgaagagtgtactgagcgtccgatattgaatagggctctttccatcagatcagcagacacagcatgatcgccttggtgtttggcaatctctgacacttggagaagcgtagaaatatggtaagggttgtattggaggtgcccgatgagtctctgtgggtccatcgattcaacacagaggtcgaactgccgttgtacatcttggtaggccgtattgtgcactattcggtagagagtttccccggaaggaagcttctctacagtctccatgcctagccctccacttggagcacgaggccactcatctttaccctgcataagaacattgcgtcgcaatgtaactccagccagactttgacctcggctagctggactgtatcttcccgtcaaggcttgagcaaggtcgatcatttgtcgattgcgatcccgacgacggcccgttccattatccgttggttgatcaaagttttccagaacgacatttccaaacagtctgcgcatctcattcgtcgcattgagaaatttgggttcaatgccgagcaattcgctcgtggtctttgggaaagaggcctcgggattgtgtctggtagatagacctgcgccaaccgacgaatgcccacctgtcgataattctttcaaagcccgatcaatttcgtccaagtctccttcattcgattttgaaggcggggaattggccgaattagaggttttggctgccttcttcttcttctttttcttgttgctctttttgagttttatcggagttggttcaggctctggtgtgtgcgtgcgaggttcctcctcgatatcctcctcatcttcctcttcatcctcattttcagcgttcagcaaatcaaaggcattgaacttcggtttcgcggggcgcggggcttcgtcttcgcttgactcatcttgctgatcggattctcgctgctgttcttgttcacgcagcttctgcagttttcggattgctcgtgatgacatcctacacaccgaggcaaagcccttggaagtatgaaatagaagctgcctgcgaaagtaaagaaagcgagaaaagcgcgccgaaagaaacccgcggggaatgacgacagagactaatacggactagctccctttggataacatttacacgtgactttcatctgcggagacccagctccttgacaagcttgaaacctctctacatacattctcaaagccgttatttgccttgaaaaggcacataaatttatcagctgtcctattatcgctggaccaatgcgtcgggcgactgttcaggcctgccgtactgctcggcttgcaccagtatggaacattgccgctaaacggccgtgccctttgactttcaaccacctgcgaggtattcggccatatactggcagcagacgctcatcacacactccagtagcttctcaattatctatgcatcgccgcaaactctccctcgctgttatctcgaccgtcgttgcctctggggcatggtatacttatcagggcgacaccgttaaatcggcagcgacccagatccgggatttcgcatcgagtgccctcaactccgcctacgcagaaggaccggctgagaccacacggcgtgcattgctggtcagcggcgatcaattctacaccacgacgctctccaaagaccaacctctcgccaagcatacagacgattcagaccgccaagtcctcgagatgttgactcccgagcaagcgacccagaagcttcgtaagaacgaggagtcatatttggtcaatcggggcaagggtgttgttcgttacgatgttgttcaggttcccagcaactcccccattgaggacgaccatgcggagaagatagtggagatcccagcatccgtggctgctgtcagcaacggcgagccaagcagtgactggatgttctggggtgttttcgacggtcactcgtacgctagctcaaggttgaatacttatgatatagatactaactataagtcaggggctggaccacatctgcgaaattgcgcaatgtcttgatctcatatgtggcccgtgaattgaacacaacttacaaggctgcttctgctgatccatctctcctcgtgccaacatccgaggctatcgatgctgccatcaagaaaggcttcgtccgcctcgacaatgacatcgtacatgagagtttcaaggaagtcatgaaatctaaatcgcgacgggtcgccgccgagctccttgctcctgctctctcaggatcatgtgctcttctcagtttctatgactcccagtccaaagacctcagggttgctgttaccggagactctcgagcagttctgggccgtcgcggccctagcgggaaatggaccgctactgctctttccgaggaccagactggtggtaccccatctgaaatcaaacgtttgcgcgaggagcaccccggcgaaccatatgtcacgaagaatggccgaatcctgggccagctcgaacccagccgtgcattcggtgacgctttctataagtggagccgggatgtccaagatacgataaaagcgaagttctttgggcgcactcctcatccaatgctgaagacgcccccctatgtcactgccgagcctatcattactaccaccaaaatcgatccttccaagggcgactttgtcgtcatggctaccgatggtctgtgggagatgctgagcaatgaagaagttgtcggcctggttggtcaatgggttgagcagcaacaatctgctgctgcaagcacgggcagcaaggcttggttacagagctggttcaggttcgatagtcagaagacactgcccgtagaagctgcatccgacgcatcgagcgagggccagcggcgtcccatccgtcagcagcaatatgatatctctggcgcggctactcgatttgttgttgaggacaagaacgcagcaacgcatcttgtgcgaaatgcaatgggcggaaaggacaaggatatggtgtgtgcgttgctaacgctacccagtccttactctcgccgataccggtaaggatatctattcttttgaagtttattttttgagcatttggctaacatttcttagtgacgatgttactgtcgaggtcatcttctttggtcagggccctgattcgcgtactgtggaagtcaaccaggaagcgagtgcctcggaacagcctcccaagtcaaagctttaggcattattttgtcttgttttatttgtgacatttccaaagcattttgaagggtggctcttatacgtcttgcaatttcctagagaatacatagttttgtcaattttacgaattatttgcaatctctagattatttatataaagtcggctgtgtatttgatgccttggaccgcataagcccaatatgtatcctagtcctagctatattgtattattgtagctaattgttatttttctacctataacatagcgaaagaaaattatatgagattaccgaagtcgtacgtcggtaagaacagaggccgcatacgcggccgactattattatgagaagtaaaaggtattgtacatgctcgaaaacaggtgggcaaggagaattatgcacaaatgaacctcgaaaccagtcgacgaactatgtgcatcctagagcaggggcggtttatgaatgtcgacgcgcaaccccaagcggtgtcctgttgcgacccgaatgtggcctccatcttaataaaactctggaattcatttagatcagcgcgtgggtagctcgcgaccctgtaatggtgcatcgctgaacgaaccatcatcgattcaaggtaaagaacccatgtcattccaaatgattcgattctcgcaattgatatcagcgcaagtttttcaactggaaaggatcattatcgcccggcctctcgaaaacaatggcttgctttttgtatacgccaatctctaccggtgaaaacaccttattgtcaagtacccaggtttgcagcgtggcaaaattggtactggtgatccagtagagcataagtgcagttggtaactcttgaacaaagctcgcaaatccaatatagcatgtcaagactatgacaaaggaccgcaaaccggtgaaagagagctgcttgtacatctcgttctttgggaggaacgaaatcgtcttccaaggcttgactttccatcccagcagaacgttccccaatatcgacgcagtcagacaaaatggcagcacgcctgtggggtcaccggccagcaagtccgggaaccagagggcaccctcgttcgcaagagtgggctcgatggttaaatgcaaagattgggctgcggaggcagggtcttgcgactcgatgaacgacgatagccaggcaatgataccacgattgttaccgctcatcccacgcagactgtccataagcgcaataaagacaggtatctgcaggaaggcgattgctttgtgctttccggatactccccaacgcttatgaagctcagctgttcgtttccttatattgccatataattctttacccatttgagaacgtgttacatcgttgcgaggcacattggaaagctctctgttccttttgtctgcatatctcctcgcccaagcgcttataattggcgatattttcttttcgcgatggcgatggagtcgagtgtataacatgataggcaacccgacaaatgtacgaacaagtacagccgttaacggaatcgaggcagcccatggtagacatgaaacagaatggacgccgtgaataaatgcggtagagccgtcaagtgcaaggtcgacgatggatgaggttggtcttgttgggtggaagtgtcgaacttgcgagcgaggcaattgtatagctcgccgcattaggtgcagagcctgtgatgagcagagggcatgcatcactgctagcggggtgagagatgaaataaaaataaaataaaaaatggctaaaaaaaggtgaggctataagaattgcggaccggcaatcggatatttggagatcatcatgtgacacgtgattacttcattggcccgatcaagttgttgacagcaagagagggggagcattatctgacttgttctctagtttgacctcaaattctcttactatgtgtgatttctgatgaggtctctttaaatattgccttttcaccatggccctcttatcaaacgtcattctggccattctggtcctcaccgccacggctatcctgcttccgaagctaacaggcgttctcctcggtctagtgtttcggggagtgggctggctgatatggcgacgaacgcggtctcgccgtgagtatgtgatcgcgcgggcgcgatctgaagaggaggagttacgcgcctcacggccgaagggttcaacaacttcagtatcgcggaacggtggcgaagatgaggactgggagaaggtggatagctcaggcccaggcggggtacagactacaactggtagtgaaagcagtggtggtactggtgaggaaagcaaccagagtccagaggactgggatgggattattgggttcttccacccattctggtatggcattctctacacacgccaaaacacacaacgctgaccaggtgctacagcaatgccggcggaggtggcgaacgagttctatgggaagcaatacgtgcaacacagaaacgctggccgaaggcaatctgtgctatctacacgggtgaccatgaagtcaataaagccacgatgctggagaaggtggagaacaggttcaacattcacctacatgctccgaccgtggtgcttctatacttgacgacccgcaagtatgttgtcagtagctcatatccttacatgacgctgcttggacaatcgctggggtcactggttgttgcctacgatgcctttacgctgcttgtaccggatgtttttgttgacaccatgggctatgcattcacactcgctctgtgcaaatggcttttcccgacagtgcctgttggcgcttacgttcattaccctaccatatcaaccgacatgctcgcctctctcgacgacaagagcggggtgcaagggatcaactccggtgcagggaaagggtggaaagggaaagtcaagcgtcgatactgggagatatttgccaagctatatggctgggtcggtcgacagatcgatgtagttatgtgcaactcatcctggacggcagcacacattcgcaagctctggggcaccggcaagaaaaccagcaatagcagcggcgatgggacagcgtcatcgccggcggtggtgttccccccaacagcagtcaccgaactggaatcaaatatcgccgttgacgcggagagcgagaaaactcgccagcccgttctactttacatcgcccaattccggccagagaagaatcacccgctagtattgcgctcctttgcgcgattcttacaggaacgaacaaacaacccagcatatgaaggccaaccccctccacatcttgtgctcattgggtcggtgcgccattccagccctgatgaaacccacatctacaacctgcgccttctagcgcatgaacttcgcatccgcgaccatactacattcttgtgcgacgccagctggcctgtcatgctgtcacatcttcgtaccgcctcagttggtgtcaatgccatgtggaacgagcatttcggtatttgtgtcgtcgagtaccaagccgccggtctcatctgcgtgacacacgactcgggcggtccacgtgaagacattgtcgttgatttgggtgatggtgcaactggattccgagctgaaacagaagagcagtttgctgcttctttcgaggccgcccttgctcttccggaggcagagaaacttgccatgcggcagcgggcccgtcgctcagctcaacggtttaccgaagaagagttctcccgcaagtggctggatcaagtagaaaagcttgttaaggcatcgaaagtttagctttgtgatatccccctcgaaaatagacgaatggcatttccatttactttagtagttcgctgaaacaagaagtcaattctatgacaacaacccttaaggactgtacttaattcataataatcgtaaaatagaaatagaagatgcggtcaagtctaagactcgtgtataaaaacagacatcgcgactagagaatctcaagtcttctaaccagaaacagataatgtctgcaatacaactgatgacaatgcgaacaccctgaacttgcccctttaatcgctatcactggccgcaccatccgagtcagtcccattcccggtattttgaataccttcagccatgatatactcggtttgctgaaggatcttcttaatctcgttattgttgaagaccagctgagcaggtttctgaccatgcttattccgcacccgagggtcacagccagcctcacacatcatcttgatcatagcctcgccgagttctgcgtctttatcgttggcgtaccgcactgcgatgtgcaacggcgtgtcattgtccagccgggtcaacgggtcgcattcgaagtattggatgtcaaatagtgcgtccatggtatcatctgaccaaaaaaaggagttagcttgcatgaaagatatgaagtgggaaggtaaacacgtacagctgccgtattgggcacagatgtgcaatgcgtggtttcccatagagtctgtcaactcgttgaagaattgtgccacttgctcatttgtcttgtcttccatatcgttcagcacttgctcaattaggtggggttggtcccggcggcaggcctccacgaccagctcgcggggtgatgcgccctaaatcatagcggcattagcgttgacagtgagcaaagattacgtagtattcacctcgtcagccatttttgtatacgggtccacagagtccggaatacccgagagtgaagtcggtagtacagaaattggtgctcagctgttatggggcgcgtggagctagttgtaacaataatccggcgttttgtatgggtatattgctgaccagaatgaatcttccacggggaaacgaagtggaatatgtatgtacaagctggattgccggttaaaaaagcattcaaattcctggtaaatactacaggttgtcggagttgttccccattccacacgcgggccgccccggatatataatcgtccgaatccggtccggatttagccgcgcgcctatatctctcattatcgacggcgatatctgcacctgacgggaactacattgtatagctgctgagaacctacctttctcctggtctagctgtctggctctttcttagccttacccaccgtatccgccagatcaccaagatgctcgtctgtatgtgctatctcctagttcacgctgtccagcgacagccagaacagaaactgattcctctccctagtctgtcccaactgcagcaatgcgctcactatttctaaagcggaatcgagcacaagattcccagcgggtgtgaaccgctttgaatgccgcgtctgcccctacgaggcaccgctagagaagaactatttcgagaagaaagacatgaaacaaaaggaagtggacgacgtatttggtggcaaggaagagtttgccaatgctgacagtgttggcagtaagttatctctgctatcttctctcagaagtgacatgtccgtcgagtatacagggctgacatactcttttttttccttatagctcaatgccccgctgaaagctgcaacggggaacgtgcgtacttcttccaactgcagattcgcagtgcagatgaaccgatgactacattcttgaaggtatgtctccctccttacatccaacgtgaggtacccgtgtctgacagctccagtgcacgtcgtgtggtgctcggtggagagaaaattagagttgggcgacaaggctgggaacaagtcacatctttcatttttggattttactacagcgaggtgcaactggcgcatttaccaggtgtttattggggcatatatgactcaaaactatcatgttgatacaaaagatacccaaattgatcaacactgaacattactattttgcgatcagcggactcaaaatttaactttttatgcatttttattttgtaccataacttattgtagctttggctttttctgtgcttcgccactataaaaatattaccgacttagtacggatgtagagcccgacattggttctgcctgggatttgctacagagaaatcggatcaccagacgccaaaaaacaaataaaattctatgcatgacattgttggtgggattatttggcggtgagcatgttgcccctcacctgcggggttctgaaaacacaaagagagaaaaaaagagaaaagaatggaacgagtcatccaatatcgccacaggaattcgtacggtgccagagaaagcgggaaataggtacagtaaacaatgcaacctagaaggttctcacccaaccactctgcgttgctgcccagttcaggcgtttagagccacagagtgggctgggacggagccgaagaaaaaaaaaagttttcacaccgagtggagtgccgtggcaggagaaaaccagagaaagggagggtgtttcaagcgcagggtagacagtacatggttcagtatgggagagtccgtattagggcaggtacatgtacctcaacccaccaacccactttgcaaaatctgcgtacacgggtaagggctagaaccaatcacaagccctaaccaaaagagggcttggccccacctgctgactcgcctcgctcgcttgcccctccatataaggatttcccctcctcccctctcccacagatttttcttcttcctctcgtctgctacagtgagtttttcctgcccccctactgcttttaagccgtctcgctccctcttccaactactcttactgattacttttgctcagtacctctacgcgttctgccgtagtctctgagcaagtttttccacagattttttctagtatcttacaaagaactacaaaaagttccaaccgtcatcatggggtatgtgaccatcactcactcgtttcattctcatcagaacagacactgactcagtcccaacagtaaggaagagcgcaaccacatcaacattgtcgttatcggccacgtcgattccggcaagtctaccaccactggtcacatgatctacaagtgtggtggtattgaccagcgtaccatcgagaagttcgagaaggaggctgctgagctcggaaagggttccttcaagtacgcctgggttcttgacaaactcaaggctgagcgtgagcgtggtatcaccatcgatatcgctctctggaagttccagaccgccaagtacgaggtcaccgtcatcggtaagagacactgtcccatccattcagtcagttgcacacattctaatacattcttacagatgcccccggtcaccgtgatttcatcaagaacatgatcactggtacctcccaggccgattgcgctattctcatcatcgcctccggcactggtgagttcgaggctggtatctccaaggatggccagacccgtgagcacgctctgctcgctttcaccctcggtgtcaagcagctcatcgttgccctcaacaagatggacacctgcaagtggtccgaggagcgttacaacgagattgtcaaggagacctccaacttcatcaagaaggtcggctacaaccccaagtccgttcccttcgtccccatctccggcttcaacggcgacaacatgctcgagccctccaccaactgcccctggtacaagggttgggagaaggagaccaaggctggcaagtccaccggaaagaccctcatcgaggccatcgatgccatcgagaaccccgtccgtccctccaacaagcccctccgtcttcccctccaggatgtgtacaagatctccggtattggcacagttcccgtcggtcgtgtcgagactggtatcatcactcccggcatgatcgtcaccttcgcccccgccaacgtcaccactgaagtcaagtccgttgagatgcaccaccagcagctcaagcagggtaaccccggtgacaacgttggtttcaacgtcaagaacgtctccgtcaaggaggttcgccgtggtaacgtcgcttccgactccaagaacgaccccgctgccgcctgtgactccttcaacgctcaggtcattgtcctgaaccaccccggtcaggtcggcgctggatacgccccagtcctcgattgccacactgcccacattgcttgcaagttcgctgagctcctcgagaagatcgatcgccgtaccggtaaggccaccgagacctcccccaagttcatcaagtccggtgatgccgctatcgtcaagatggttccctccaagcccatgtgtgttgaggccttcaccgactacccccctctcggtcgtttcgccgtccgtgacatgcgccagaccgttgccgtcggtgtcatcaagtccgtcgagaagaacgccggtggtgctggcaaggtcaccaaggccgctgccaaggctggcaagaaataaattattctcggatgatgctcattatgccgtgatgattttttcttttcaaaaacaattactggatcgaggtagatttgctgtgtagtagaaatgactaccacatttttatgacaaattcttttccttgtagacttgtaatattattaaagtagctgccgttagacgttgtatatttttgtctcagcctatagatcgcgggatggcctgaagctaatcttggcgtgacgcctgattgacagtacacctatagaccatgtaccttctgtcaagactgtataatatttgcttcaatccctctctttctttctgctataccgataacattaactatcagacttgaacttcttattccaatcttttgtaacccgattgaatgagagggcatcacgatcctatgatcctcaaatcggcttcatatcaagcgatatcaagtaaggaatagcaccatgttcaatctggggcccaaatacatatcagttccatcctagttcgatgtaaaagcccgttctagacttatttctgtaggatcgaccccgatcgatcgccacgagacatggaaacatatatattttgtcatttgtgtacatctcatagttcatgtgtatgcgtatatagtctaacggagagaagctcctaccaatgaataccgatttatatcatgatcattaaagtgttaccatccaaaatctgtaaatcatactataatcatatagccaagttctccctcgatgagtacatgatgctctctagtatcaggtgtgaagatgaagaatatgctcgaagaaagaatttgcctacacatagtaatgaccttcaaaaattaaaaacacaaatattcttgggtatcaagttgcagatacctacatgtagtatgtatccaatgttatcacggcgtgccaatcgtagacatatcaatcactcttcctcatactcttcctcatcagaatcctcctcttcctgagcaggagcacgcctcgaagaccgtctaggcccagagcttcgcggcgtctcacgttcctccccgtccccgttcacatcgctcgcatcatccgccccattagcttgtatggtcgccggctcaatcccaagactcctcccgagcttcccctcaaagtcttccaggtcctccctctggaaatcagtcaagttctcgtggggacccctgtttttcccatacacagttcgcacaagacccgccacaccactagtcccaacctcaactttaccccgaggaccaagaatatactcaatcacctcctcgccgccatccatctcccgcgtcttgataatgtatccctccttgcatagccgctgcagtagtttatccgtgcggtcgaccggcgtagcaatctcggcgttagtgcgcgtcaggtaccggtcaagtttctgctcagccagcgaaccgccgttcagcagaatcaccgcaataatgaaactgtacaggccggtgtatgtgctttcggtgtagagggagggtgccttggtcgggatgaggatatcgggggaacgatatgcgagcggcagtgtgctagtaacgatccaggacttgttacccgaagaaggcttttcaattttctgcgcggctgtagtacaggaatgccatgccatgtcagtagtgaatactcagaaatagcatgagtctgcaacaaagaaaagcaagacatggaatccaactcaccccgtcgctggctgatggtgaccttctctcgcgccggtaactcgctcatctccataccaaagcgctgtctcatttcccgctgcgcctggtcgaaaactagcttgaattgtcgcgagccgtgctcgcccagcaccttggcgctgatatcgttgcgccggatcgggagccgcgaatactcgctggctagggcgagccgcaccaacttcttgaccattgcgtcggtgctggtcggtgcgctcggttcgtcatcgtcgctggatgctgcgggcgatgaggcgggttcttcggtttgtcttctgcgacgagcgcttggggttacctcggtctcgggtgcttcgttggtctagggaaggcggttagttggtggataaaccaagggttgtgtttgcatacgcgtcttttgcgattcgatgacattttgattatgtaggtgtgataaattgcaggtgggtttggagagacgcgacgcgatagactgattttaccccattggggttggtctgtgcgtagcccttatcgatggttctttgtttcagcagatgggcttcgatgtcagtttctttattttaggttccttcgaggattgtatttggtaatttactgaagaaagacatcattttcgacgtctacgtatatggagagttatatgacgaaatccaatgaattagcgtcgaggtataattacgtcgatactgggaacgtgaactaaatacaacgtgggcaaggcaacacagagcagcgatgaggtattatgttctctaaaagaaaaggaaaaaaaaaaaacaaacaaagaaaacgaacgctccaaaggtcaaagagatctaaaatcagtggttgtacttttcattgacaacctccttcgtctcctccttcttactctggaggaaagtgctaacccaagccagggattcctgcgacagaaccaagctggtagtaacaaccgccttgcccgaagcaaagacaccatcaccaccacactttttgtactccgagccatacacatcgaagacatggtgcttgacatcgccggcgacgcggacaggcagcgaggcactgttgtagatggaaccgcgcagcttctgggtgtcctccttgaagatcgggaagcgggtatcgatcttggtcagacccttgtcaccgagggagtcggcgcgggctatgtagggagcgacatagctgtatggggtggagaagtagggtagaacgggtttggcgagacgggtgtagccctggtcagcgaattcgagggacttggctccgtagggattgcccttgtagtaggagatagagtcggagatgatgggataagaagtcagatgctagattggagatgttaggatcattctcgttaggctgtagtggggtacatacgtcaaggaactgagagtagtgcttctcgccgttgacgaccggttcacccatttttacttctgcgtggggcataaagattgtaagttgagaaggatatagtataagaatacagaagagaagagagagggagagagggagaggaataaattgggttgtatagaggaaaaaaagggttttcacatgtgattgcgctgtcattatgcaatgggtcctaccgcaatcgcatcatttgccatacatcgtattctcgggttatttcagtcctctacttgggattattcttcttctttgctatgttcttttgctatattcttttttccatcttttttacgaagacaagggttcaatggccgattctaagtgatcccacgccaatccattgactttggacatgcactgaaaccgtccgagcaattgcatggctaattatagttgacgtatcccaaatatacttgtttcgattgccaaaatcctgaaaaatcccaatcgatggattcttgataaggtgctttcgcatgtgattgcgggtctgtgaaaggtggttccacttgggtgtctatcaatgatctgttctatctctcttccacggtcaattcctaccttcccaggtgcttcccagggtttgatattccccagaatttatccattgaactcaaatgaggggagacctcgcaagataaaccttgttttcgtccgttccaccgtttttcgttggacgagactgcttatctgcataagaaaaccgcctagacggtgacagatggccgcagatcggggctagtttgccagcatatggctgatgcttcggcttctaagttatatgagtctagcccacctgcacgtacattggtgatgctagtcatgtccccacctattggcctgaccgtcggcccctcgaaccgcttctactctcgggaatacgtaacagcctccggtccaaatgtactccgtagggggagtaagattgcgcaaggtcctagccggattggagatcgttctgccgaccccgggcatgggacgggcgaagtgattcgcagggtcatccgaatctcggcgcttgatgtgactctatggaacggttgcgttcgataggcatacactactatggccatactatatttattggtccaggcggtttatctgagcgatagaaggtaccttggcacttcgtacatattacctggtgttcccaatgcggctaacggaatgcggaatgttatgtattcggtacgactatcagggtaagccgagaaggtggccaggctttccattgtggtcggcacatgaaaaactgatgtcgacacagatagttatgccatggacatcgaaattctaagccggagaggcgatgttttttttttgccccccctccttttttttcttcttttcttctttctcttttgctcgggactacgccgatcgactagcaacccactcgattacgattaagctactgtgcagatccctgtataccgtgggtcttgaccagcaacggttgtcttgacatctacaaagtacaaactctgccctttctgttcacgtaccctttacccagaataccgcccaaaaaaatacatcttatcattgcttttggagcctttggaatattgtgtagtcgaaaatccccatttaaactgtggcaaagcacgccactcccctacttctcatgtacaattgggtctaaaatggagtggcgattggcatgaagatgcttacatatggacatctagcgtcgcggaggcccgtgatccgttgttagcgaatgtatcaatttcacatgtcaaactgaggcgtcgtttagcgttggcgctctcgatgtcaaggattcaattgtgttgccttgtaaatcaattggtcgactgaggtgattatcacatgaaatcaggcgaacacggcttattttttcaggcgttttatctgtcaaatattctcgaagcgctttgcccttggcttggcagttgttgttgcattactacgtcaacatgtgtgccaagggaatcagctgtcggacatgatgccgcgcatgaggggatgtattttgtggtcgctttgttgtgtacggactagactccacctgaaaggaactccgggtttcacatattcttggtatcgtatgatttactatgttgtactatgttggagtcaatcggctattgcacccgacagctatgcactctcatgcaggctctcattctatattcccaccctcatgatagtatcagtgtatatcagtatttactttggtcaacctttactccttgaaatgtatggtatttttgagaaatactagcgtagcagactgtatgtgaattatattcgtggtgggggaaaatatcagaaatatatatgtagtactccatatactaggccggaaaaaaaaggagacctggtcaatacctaccaggtactccatactatgttaaagaaactgatcatctcgcatgcgttgcggcaagtccttactagctgaggtagagcgtgatcggctgcgactaggtgaagggatactatctcgctgcgctttagagaggcatctgcaatctaatggagcgggatcattgcgcgcacgattccagcgaagatacgaaacatcatcacgactgacaactccagggtggtcatttgatagagacatattccaaggatggacagaatcctccccggcaggagtgtgcaagggtgctttaagaacaacctcaaagggaccaacggcgagcgagtcttgctggagaatcaacttccaaagatgccaaaagctggtatcaatcatgtgttggcccgtatttgcactgagccgccaataacacgggaatttgttagtcttgattctcacctctgcaacctggaagggcgggagcggaacctcgtggaggaatctctcaggtagatcggctatgcccatgaactcgctctggatctgtatccactgctcctggtattgttcttcgaaaaactccgtccactgtgggtttacgccgctgtcagctaaccccgcggacatctcccagatgaaatattcggcgttgacccacttgtcaatactgaacgatgttttcagaagggaagtagtgtcgcggcacacgttacagtgcatcaggatatgaggcgtggcccgcacggctaccatgggcatgttgtagtgtcgatggacctcgttgtccaaccatttctccctagcgtgctcgcggatgggtttgagaggaatggccatggttagaactagatgactggcgatctattgacttgcagcttggtatggaccctactaggtgttcgagtacttgattgaaataagagatcagtggtctatataaatactatgtctggattgaatgaaatatcctattctgggcccgtggagactaagataaaagaagacaatgaagataaaagaatgcgtttctcttattcgaagattgaaccgaaaatatcgttcaaagaccattgtccccttgtttactgtttactagagatcaaaatggttcagttgttcactggaacttggaatcaaagcgactctttgtttggaatagatgaaaatactcgagcgctgtcaaaactgaaatgccagtgggtaccagcacaagcatgcatgctatatgctagaaataagttcaagattgaatcctgctagtgttgaatactcaagcgctgatgcccatatcgctgaggtatgatatgtcttggcgggggtggggttcacatgtggtatgcatatagactgtggaggaagacaatctataattgtatccgcgagcatggacatgaggacctagacctttgggggcttcctcgacatcctcgtcgtgatcgggaatctagagtcttctttggaactagacgagaggcctatgtaagtaattgcttttcgaaaactacgattgcacgttacggatagacatggttacatcgatcgtagcaatgaaaccatgagattgaatgccctgagacaaaccacatagctacagggtcatccaggcgtgggaatgatctgtgttaggaggacagaccaaaatccttcccggcctatgcgaaagaggaagatgtcgaccagttttcaggtaatagacaacattgattttgaaataattgttcattttccatttcattcagacggacaccaggtatggaagtggcgcccccgttaaaactggagttcatcgatacattcacgaatctgtttccagctatggcgtatgttttcccatcccatgctcgcagggaccgaatgttctcgatggcttttcgacctcgccttcacctagaccagtgcgctcaaaacgacaaaacgcccaaggaaaccgtttagaaacctgtttcggagaattagtgcaagttccaatatgcatatatgtatatcccgggccaaacatacgcagggcagtgaagaaccaacggttctttccgctggtgtaacggtcctcaagagccttcttgatggtcttcttggcgtcctcgcgctgggagacctccttgaaggtgtcgttggtgatggtacccttaagaccctcaagctcgagagtgtaacgggtgggcatcaagtggttgtagttgatgaccttgatgaaaggcttgatgcggctgcggcggtcgacaagcttcttgcccataccacgggtcaccttgagggggtaacgctcgataccggcaacaatggcgtaggagaaggggtgcgacttggagccagcatcaacgggctggacaatgacgacctataaactcgaacaaaaatgcctgattagcactccgaattttttttcttgtcgcgcagttcctccatagtgcattgtgctctttcaaatctcgagtctttcgcttgcaggtcgttcgcctctttctattctcgtgctcaatttcggggaggatcaggatcttgtcgtaccttcttaccggcgtagcggccacgggtgatgatggccacacggcccactttcatgactgtaacatatctgtcagcatataaatcgtaaggggaatcgaatggtgaagacgtacacttcattttgtgaaggtcccgggggcggcgaggatggctggttgtcgagatacggaacggtcaagatcaaagtattcgtttttgcggatgtgaggtagagggtttcagggcacagtagcgatttgtgtgttgtggattgattggttgacttaccgacagatggcgactagcctgtttggggatagtttccccattgagccccggggccggaggagatgatgacataatctgcatgttgtgcccagccttgacggtgtagggcaggtgcggcccagtcctgctcaccgcctgccttgattcccgctgactcaggttgtgtttacatgacgatcgcagttgccccggttgctagggccgtgagtgatgtatacaagactgcgtagctcctctttctcctcatccccacttgctttccacttatcaagctgatctcccggtaattttctctcctccaccgagctctgagattgttagctttgttttgttcttccagcgtttcctccttgacgaccttgtttttactttgaacgcattctacacataccctacatacattccatccatattgtcaatacctctctgagacatctggataatccactcacgaagacatcatggtgtccccagagaaggataccccccgtgaccgggaattggtccggcattcactgacatactccgagtccaaagttccaatgtaggtttcgcaactaacgccttctgattcttgtttcgcgaaacccatgggtgatttcaaacaaatgctaaaacgcggtctacgcaggtgggacagttcggatcccgagcgtgcgcctccaccgctaccaatgaatcctcgttcgatgagtccgatgagccctgcgacgaggtccaatgtttctcccaacattcaagcagtggccgcaaaatttacagagagacctagcgataatgcaccgagctcctacacaacaaatcctatgccactcaagtcttcctcgccagagaggtcgttggtcaaaggccagcacaagcgcatgcagtcactacagcctgaagatacccgacaagatgcgcgcagcgactttctgaattaccttgacaacagatccccagagcgtcctcttcgtgcgacgattattgatgggaccaagccgcgcgaccctaccaagtcaaccagttcgccagtgctccgtcaagatgtggaccgcgagatgaaatactccgtttcgagtcggtacttatccaagccaatattgggagagagtactccaacctcagctacaatgttggctctgcaaaatatgcagctacctctagaacccgaccctccatcaccttccaaaccgccaaaaatgatcgctgggccatttgagccacaagcttattccacaaagaatgcaagcatggacaccctctcaaatcaaatccacagtctcacggacattgcaagcagtctgcagcgtgagatgatgaatttgagccgacgcagcaaagacaatgccaccgacctggttagcctcaaggcggcaaccaacgcacgcgatgaagacattcgcaagagtctgaaggatctgtcctctcatcttacaaacaagtacctggacgctgaggctacaaggtttgaattcagcaatcttttcaagggtggtgatgggcctaacgccaagggttcggatagtccagtttcgaagaggagctactccgtgcctcgcatgcctagccctaatccattcgcatttgatcgggagtcttgcgtctcacctgctccgatttccgacggttccgcagcccttgctttgctcgaaaaggtattgcgcgagatggcaactaaggaaggtgaggaaaggatcttagaggtcgttgaagaaatcaaatctcgaccagcaactagcgcttcggataaagattccgataacaaggtcactgctatgctcgaggagatcctcaatctcgtcaaagaggatcctgcaagcaaagccctcgtgcgatcttaccgtaggggcgccaataccgataatatccaatctgggaatgcctcctccgagccgagacgatctgggtcgatgggatccgtgcaccctgaaactgtacgtgcactagacctttctaactctgagaaggagggcagctcttcacccaataatccggaagaagttctggcaattcttaggagtgtcaagaatagcgtcatcgaaggaggtggaatgaccaacggcgtgaagtcgttggtacgtgagctacgaggtgaggttctgggcatgggtcgagaacttgctcgccgattagacgagatcgagagttcccgttccaacgatgagtccgaggagcagcctagagccgctggcccagaggaagtttccgccattgtcaaccgcagcctggacgacctcaaagagcagctggctgctactatcaatgagagtcggcagcagtcgtccgacttgtccgaattcagatcaaccatgaacagtgccgcaatctactctgttgtgaaaaaagcactcgatgaatttgaactacctcaaccccaagcccattcgcgaggtgctggaatggacagagaagatatcctcgagactgtccgtgaagcctgggagacctacaagcccgaaatcgagttcaacaactttggcttggaacgagacgagatcctcacatgccttgaagaaggtctcaagtcttaccagccccaaaatgaacagacggtcacctacgatcagattctcgcagccgttgaggacggcatgcagaagttcattcctccacaaatcgagcatcagccaagcatctctcgggatgagatcatcttgaccatccgcgaatgcttggagaagcagcccgagtctgcctctagatctcttgacgaggaacacgtcggcgatcttcactcgatccgcgacgagattctcgatgcggtcactgggacaatggcaacgaacaacatgcagcccaagtctttggacgaggaccatgtcaatcacctccactctgttcgcgatgagatcattgaagccattactgaggtagtgacaagccatgccgcaggtcccaaatctgtggacgacgatcacgtcagtcatctgacttctatccgtgacgaaatacttcaagcagtcgtcggggcaatggctacgaatagcacaggctccaaggagttggacgaaggtcatgtccatcacatgtactccattcgggatgagattctgcaagcaattaatggaatgatggacatcagcagcacagggcctaagacgttggatgaggaccatgtcaatcacctctactccatccgcgatgatatcattgaagctgtcactggggcaatgggtaaccacagcacctccaggcctttggatgaagacaatgtcagtcaactaaattctatccgggacgaaattctcagcgcattggccggctctatgacacaaagcacactgagcaaggactcatacgactctggccttggccgcgacgagattgtccatgccgtttctgatggcctcgaagcccatttcactgcggctcgagagatggatgagccacgcatttcccgccatgatgttatgaatgcggtcaatgaagccttcgatgctcaacaatcagctcttgctactgctcacacgaacatctctcgtgatgaaattttgaatgccattgccgagggcattgaaagttcaatgaacgctcagaaatcagcactcagtacgccctctcgtgaagagattttcagcgccatcgtggatgccatcgaacactcacgttcttccctcaccaacgacggggagcctagtatttctcgagacgagatcctgggtgccatcttggaaggcatggagcacttgtcaaaagaaccgaatatctccagggatgagatcatgaacgccattgctgatggcattcagaactcgagtaactctgtttcacgtgctcttacactgcctaagcaagacagtgacgatcagcagtccactctttcccgggaggaaattattaatgcgattctcgaaggtattgagcagtcccaggcttcgctcggcgtgaatggtcagcctagcgtttccaaggaggaaattatgagtgctatcgctgagggtattgaagcctcggcaagcagccagcagtcagcgctcagcaccaacgtccaagagccctccatctcacgcgaggaaattttggctgccatttcagaaggcattgacaatggcaattccatcacccgggagattgagctcaaccaggacgacctcatggaggcaatcacctccggtctcaacgaggctatcagtaccgcaaataccaacgttggggaggagatgacagaacgcctccaatctttattcgaaggcatgaaagaggaattcaagcaatactcggccgccggtggaagagataccgagcaagtcctcgacgccatcaaggatggcctcgatatcgttcgcaaggagatcgaaacttacgtggttactgcggccgatctatccggcaaggaagaagtaattgacacggtgaaagaggggttccgacttctccacgctgatatggaaaagaccattacagattcaacacttatgaatgccccgcgaggcattccggatacacctgagcttctggatgccatggaaaaagagttcgagcacctacggggaaccatcaccactctactcctacgcaataatgccactgaagacaaagatgagatcttggacgctattcgagaggcagctgatcgccacaagaatgaccccggcgatgatgttgtcaatacgatcaaacatgaattcgagagtctccgtgagcgcatggagatgagtgtggttcgtgccgaacctggtgctgagaaagacgagatcatatccgcactccgtgaacaattcgacaccctgcgcgaggagacgtcgcgtacagacggcaacgaaaccacgatgtcctcgacaagtgagctcctcgaggtattcggagatagtgttgactcaatccgtaacgacctgaagaaaatattggagaagccaactgagttcgacagctccgagattctcgataccatcaaacatggtctcgcagatctgaagcttgaaatggatactctccgtgattccaacaaagaactggatgatgccagtaccgcccgcggcggtgaactcatcctggcaaacgagcccagcattggacctgacattgacggtctgaaagtgcttatcaccgagcttcatgacaagatcgaggccattgaaactactcctcatgccgcagaagcttccgaggatactctcaagcgctcacaccttgatgaagtccttcttgcgattaacgaagttcagcttgccgtgggtgagatgagtactcaaaaaagcgacgagaacaatcagacggctcgaaagaaggacattgagattctcgagcagttactcttgagtgcgaagacccagatcgatgaacttgttttcccttcaccggaccaggtcgctactcctgagcacattggagccctggagaccatgatccgagaggcaaaagaatcgattgcccagttttctagtcgcgtcgaagccgagactcccacaaagtctgaaatcggcattttggagagtctcatcaaagatgtctgggttatcctagatgagatgaagagcaaaactaaagatggagattccgataaattacttaaaactgatatcgaaacggtggaagcaatgatcttcgaggtcaagactcaaatcgaggagcttaagcttcctgatgtgaatactcttccaaccaagacggagatccaggagctctcgacacttgtctgcgatttccgagagacgatggaggccaataacgaattgacagcccaagggttcgatgctcgcaaggttgagcacggtggtcttgccgagaaaatcgatgaagccaagtttgtcgtcagcgagctcggggacgaactcaaaagcaagcttgatggcagcaccgaaggcctgaccgagcttaaacagctcctcgaaggactagccatcaccgcagagagcttcaccaccgtcgaaaacatgaaggagctcaccgacttgatcaaccgagaattcgaacgttctcggggcgatgaagatgcagtcaaggccgaaaaggaggagcgggatgctgctacaatagtcaaacacgatgagacgcgggccgccatcattgtggagcttggcacaaagattgacgagaaaatttccgaagtcttggcgaagtatgaagatgcgcatacgtccctccagtcgaagttctcagaaaccgaacagagagatctggcacacaccgaatctttgacaagtacgagaagccttgccgaggacatcaagcttgtcatcggtgctatgggcgatagtgttaatgatacctgtgagcggttaagtgtggacacgaaggctctcatggaacaagtcgatcagtcccgccagcaaatggagagcatgcacaacgatgtgagatcgcaccaggagcaatctcaagctgaaaacgaaagggctgcagctgccactgatcgagtggagagcaagctccttgaattccaccctcgtattctggaatctgtgcaggagatattgacaatcgtcagccagcactacgaccactcccagaaatcagcagaagacttcaagtctgaactgtccgcattgtcttcaagtatcccagcaatgctacctgcgctgcttccaccggaaccagaccgtacacttgccatagaagatactccgctacacagcaaactcgacgatattttggaacatgctaagaacgacaaagtccacgagattttgaacactctccttgatcactcgaagaatgaccaactccatgagaagcttgatcgtgctcttgatcaaggagcgggttcgaatgatcaaatatatgagagactcaatgagttgttagatcgtgccactaatgggagcggtcccgttcatgagaaactagacgcactgctcagccgtccctcgaatccgccggaatccgatcactctgctacccagatggcgaagctggatgagatgcacagggatatcatggaaaactctcgcagaatgaatgagatgttcgctgcccagtcagtgctggtcgctgaagataccgagcgaaagcgacgtgaagctgaggaggctgcgattgctcttgaacgaagagtttcgcagcgtgagcaggtggaagcggagctcgttggcttgcaggaagagaaggattctatgctgaacatgattcatcgcctaagagcagaaaaggaagacctgatcaagcaaaacaacaagcttagcaaggatctgtccggtcttgaaacggccctagagatacgccacgaagagatgcggcagatggaggaccgcgcggatggccttgagaaacgcatcctggagggtgtgctcgaccatgctcgtactattctcctcggccgatccaatggctcgcaagccatgaacctgaagaggaaccgcagcactcggagtacccgttcctcacgcacaggcgctcgcagtcctagtctggcgagcactgctagtactgccaaagagcccagtcgcagtctgcttggtaatggtgtcggaatggctttgaaaagaaccccgacttcgctccaggctggaaaagttgctgtgcagcccaacatcggaaaggaacgtcggattcttagcttaagtcatgtcactggaaaccgcggtgtggaccgacaggtgagtgctaaatctggcatcacgaatttgaagcgcagccactctgtcaaatcgaactctcttcgcaagacttcttgggctggtccaatttctgttgtcgacaaagagaacgagccattccacgaagaggacgagcaagccagcgaagcggaagatgctggtccacagcgcaagactagttatgtgcaaagtaacgcacctaccaaccggaagacgagctgcgcagaatctgaccttggcactgaaaccgagcatggctatgcaccgagcaacgctggcactgaccgtcgaacaagctacgcagcaagcaatgcaggcacggagcgcaagacaagctactctggcagcatcgtcgacagtgtagttacagatgcctcagatcaacgccgtgtcagcggaatgagctccacgaattcatacaacgtggcggagagctcaatcgccgagcacgaccacgaggactaccatgatgatatttctatcgatggctccgatgcgcaaacagcacgagaggacggagagcattctgggaatgaggaccagaatgaggatcacgaaatgtcccgccagatccagcaggctaatgaggctgcggaagccgaagctcttaagctgttggctccctctagtggcagcactgatgttgcagtttgattgatatgttttgttttggatggagttgggcgcttgcaccatgaatgttttctttctttctcatataccacttttgtttctgcgtttcagtgcttggatgatttggatgactttcgtttgtgaccataaaggtgtattgtttaatgatgattttcttttgtactcttccaatacacctgtgatgtagttcgattgtatagatgtatcatgtatgtggtcacttgttgacgggtattgttctggatcacaaaccatatttttagctgcttgaaatcttccttcgaacgactagtccttgtagacctaattttccttttttcatcatctgtcacctttgtacaagtcgacaaagcccgacccaacgaataaggcaggtgatcaggtgactcccaacaaatcattgctgcctgaggctatgccgaggccagcttcacctggtcatctctctactccattctcggatggagctacatatttctcccctattcatggttattgggctttcctttgtttccatttccatttccagtttttcttttcccttttccatttcttcctgatagacaggatagggtgccctctcaaccgcatatagatctacattccgacctccgaacctcaaggagctttcccccacatcgggtgatcacagctggttgaggggacatcccacgatgttggaccctttcccaccgcctccggaatggctgcggagctttgtagagccctataccctccggttgaactgcccgacacttgccgaccatatccacgaggttatcgcagcgtttgccttctacctgttcatccatacagttctctcaccccggctctcgccaatcctctttcctcagtcttacaacaagctcactcctcggacgaagctgaactgggatatccatgctgtctcttttgttcagagcattgtcattaacgttgccgccctgtgggtcatgttcttcgacaaggagcgcagctccatgacctccggtgagcgggtcttcgcgtatacaggtgcctgtggacttattcaggctttggccgtgggatacttcgtatatgacctgattgtcagcattgtgcatgtgcgcatgtttggccttggaatgcttttccacgctgtcagcgccttgtgggtgtttagtctaggctttgtaagttgcgtctccaatctgcctgatataggtacattcagtatcaagaagatcagcataaatgcgttttcattttttaaaatcgagaaacatctaacatagtttccgcagagaccattcctaaactacttcgctccgaccttcatcctctatgagctctccagcccattccttaatatccactggtttctcgacaaagtcaacatgaccggcagccgcgcccaatggtataacggcatggctttgctcttcagcttcttcgcctgccgcctcgtctggggcagctggcaaaccgtcattgtgtacatggacatgtggaatgcgcttcagcaaacctggtctgcagctgcagccccactctctgaacccgtgagcatcaacgcacatgtcttctacccagcccgcgatggtagattgtgtgtcaacgaagcctgcgcgcgcgccaatgccgagatcaccaagttcaaggagcataccgcgggaggtgtaccaacgtggctggtcgtgacctacgtcggatcgaacttgatcttgaacttcttgaacttctactggttttccaagatggtcgagactgttctcaagcgtttccgcactccggctgatgctgctggcatgaagaaggggacgaaagagcctgttagcgcagagaaggatgcgcagctcaaggaggatattgtgcatgatgttgtcctcgaggcggcttccaagctggagcagcaggagaccgctattttgcaggatgagctttcctcgttgcatgaaaagatctcttcaagtgtggactcaggtctcggggaggagttgcggaaacggagagcagagcttgtcgcgaagcttcctttgcctggtgcttgaggtttggatgggactttaggttgttatttataatctatgtgtctttgagtgctgtgaagtcttcttccctcttttgtccatgcttgctttatgattgattgagatgtttgtgactcctttctatgttgctttcccttgaaattggtccgacctcttctatactggtccagagacacaacaacgcctggcgtgatggctctattattcaaacaattattgaaataaatccggaatcatattggataatatcggattcttagaatacagatttcaaaacaattcctgcctgtcataccccggctacaccagtccgaacaccacacaagcgccctatatcagattaaaaaaagaatacatcaacccatcttcatttcgtaatggttggcagtgtgaatatgcgactttaaacgaaaaggacaagcaggatatttaccgagcagccgcagcttcgggtttagccagcatgtaccgcacagcttccttagcaacctcagagtcccacgggccgtcaacgccgccataactgaactcaggtccgctaccatcctcgccgcctccacgggtagcttcacccatgatagtctcgaggtcgcggcgctgagagctgatccagcgacgaacaaaattggctgggtccttgctcagagcagtgtagaatgagtggcgagcacgggagtgtgtaagggcctggacaatcaaagcaacttggtcatcaagcgaggatatctggcgtaggccacttgtgtacgctgggttctgagtgagagccatcatcttggtgcgcagcgggtcatcaactgcgacctggatatcgtagatggtcggggttgggtcactgtggaactcttcatcgacgcgaatggtgtagggaagcttgattggttccatagggctggtgtgaggaccgatgctttcaggaatctgggggaaaaacatttgctcccggccaaagatctacagagcttgttagcggatactagaaacaccagacattcaaagtacataccgagcgtagacggtgatcacagcgcacttgtcgcttctcctcgtcttcttgcaattccatggctcggatgtaatcccagattccgagaacaattccactccgggtctcctcttcgacatctagaacctcggccaactccttgctcagcttgtatcgctctggaacttcgtcccggacaaggctgatggtgacattcagattgtcctgcgaggctcgggagaactgtagactatcaaattcggcaccttggggcgctggtgtgttggggtgtgtgttgggtttggaccagttaaccggcttaacctcctcggggattgccgagacgggcttatcaaagtcgatggtgatagccttgaagaaatgggagaagcgctgggactgtctcttggattcggatttctttcccttatcctcctcggccccgtcgtggtccatcgcatcttcatctttctcatcctcatcgggaaccgtagggtcggtttcatcgtccaacagtcgtccttcgatgcgtaccttgtagcggccggagcctgggttgttgcccgggccttgccatggctggttttcgacagtattagagatccagatgcgcatagtccgatacttcttgacggttttgttgatagagtcttggatatccagcctcttccgaacaacagcagcatccaatcgcttttccaaatcgcggaggtttttatattgctgaacaccctcgccgatgatcacatcttcaatgccgtcggggaggttcctgtcggtcggcttgcggctgcgccgaagggcagcatcattcgggtggggcataggacgcgatgccatgtactgttgggcaacagcgtgttgtggcatcggaacaggcattgcgccacctatagagacggaaggttagagccgagacgaatgagtggagacagatgaaaggggacatacctggccctggggggcgacggggcgcggctggagatcgctgtacatttgagggcatggcccgagcataatgttgctgcattggagcttgcattgtggagaaatcaagcaacaaaacggtgctgggaggatatggatggggggaaaagatgcgagatggtggagatgcgaggtcgcgattcttttgcccgtcgcgctttacccttttcggacactcgcgaataacaccgtcgagaggagaaaagtcattgttctacatgaaattttgcagttgagatttgatgaataattaggagctagacatataagatgtagttcacatgttaagtactaattacgcgcagatctaagggtaattattgatgtgatcgtgcattgtcttgattatttcctatcaagtcattgtctcaactgcattggacatttcccatcttttctattccaggagagacgcctggttagtatacagaccttccaccacattgccgagcttttcaatggtctctagtgcggcatcgtaagcttgatcccgttctgtctcatcgtacacaatcagacatcccgagccctggtccaatacaccgatgatcaccttgtccaagatcatctgagacagcttcctttccacctgctgtgtgtccaaacccaccatcttcgcaatgtggtccagctcgacccggctgaagggttcaatgaccttgatcaagttttgttccagcattgcatcgtaaagacgacggaggtggtttcggatgaatacatcgctgcccagttcgaatctgtagtccgaaagagccttctcatactcctccaaagaccggttggcgtgggcccgtgccacggccttcattgcctccaggcgtggactggcatacttttgcgcttgtttcgagccttgtagctgtgtgacatcatccaccaggttcagcatgattttgcacagaagcatgtactgcaatgtcgccgtggccaggtcgctctcatcgagcgagctgtacccctcaagcgcttcaatgaaataggagtatgaagtggtgaaatccttgtcttcggcgtgcagcatgccactttgcatatccagaccggcctgcaggttcggtggcgtgtaaacggaggcggccgacgtccgtgcagctgtcagagctgcgcgtgccttggcctggttgcccagagcgtggtacacacgcgactcgagcagttgtacttccaccagcataagcttatcatccaggcgcttcagctcacggagaagagagttgataagagtgagcgcatcgtaataggattgcttctgcatatagattgcaacgagtcgggcttcgagggcctggcggaggaacgatcgccgctcggaaatagcccattctatgcatgattggatgacgttgccttggagttcgagtgtgttggggatttcgctaatcaggtccagaagttgacggactgaataatcacagttaggctatttccatagaagtaatttagcgcgcaacttacctagcttggctgttttcgctttggcaaatgacgagaaggtatcacggctggtcttgatgaggtccgcgatctcctgtggcttcttcgcatcccgatgcaactcgcccagcccaatcaaggcatgttcgtagtctcgtgaagatgcctctgtagatccggggccctctgagagaatcttctggtaactggtcgctgctttcgagggatcctccttcaccagatctcgaacttcttggatccgtggcgagaccttggatgacatgataaaagacggcaaatggcgagtgagggagatagagaattaaaggaaaggagaacaatagaagatggtggtttgaagagaggttgatgatcaggtcgaatggggagctcgaagctggcggcagctcgctgtcctctcaccgcccgcttggcaaatcaaacagaaaaaaagttcgctcttggcatttttcttttcttttctacttcgttttcacaacggcactatggtgggtatttttctttgaaattatgtcttttggatagccatgctaatggattatagaaaatcaaagcactctcccgctccacggcgtcgcaacaggcccccgggtccgctgtcgttcgccagtcgcggaatctcgacccgactcaacatccttttgagcgggctcgtgaatatactcgagctctgaatgcgatcaagatggagcgcatgtttgctgctcctttcttagcccagatgggtaacggacacgttgacggtgtttactctatggcaaaggaccccggctcacttgaacgctttgcaagtggcagtggtgatggtgtggtgaaggtgtgggatctaacgacgcagggcgaggtttggaatacccaaggtcatgaaaacatggtcaagggtttgtgttggacgccggagcgaaaacttctgtcatgcgcgagtgacaagacgattaaattgtgggatccatacaactcatcatctgaggccccaccgatggcaacctatctcggaaatagtgccttcaccagtgtcacgcatcatcggagcctcccttcttttgctgcggcttctggtgtcatctctatctatgacctttcccggccgtcatccacaccatcgcagactatgcactggccgaccaacgttgacaccatcacatcggttgcattcaaccagactgagacttctatcctggcttcaactgctatggaccgctcagtcatcatgtacgacctgcgcacttcccagccggtgcacaagacgacattgagactggcatctaacgccatttcttggaacccaatggaagcattcaactttgccgtggcgaacgaggatcacaacgcctacatcttcgatatgagaaagatggaccgtgctctcaatgtcctgaaggatcatgtggctgctgttatggatgttgatttcagtcccacgggtgaagagctggtcactgcctcatacgatcggacaatccgcctatggaacagatcaactggtcactcgcgtgacatttaccacacaaagcggatgcaacgtgttttctcggcaacattcacgcctgacaacaggtatgtcttgacaggatcggacgatggcaatgttcgtctctggcgtgccaaggcatcggatcgcagtggagtcaagactgcccgtcagcgttccaagctagagtacgatcaagctctgatccagcggtactcgcacatgcctcaaattcgccgcatcaagcgccagcgtcatgtgcccaagccgatcaagaaggctggtgaaatcaagcgcgaggagctcaatgctattaagaggcgcgaggagaatgtgcgcaagcatactaagaagactaatctggcgccgagaacacatgagcgtgagaagatgattctggccagcgagcaataaatcgatccactcgattcgaccaggctcggccgcaagacttgcaatcgaaactatggtcgaatggggaaattttcaatgaagcagatcgttctgctttataatccaccctgcttggacctatacaagggtcccttttcatgattcatgccaatatacaccgctcggctctatttgagccacctatcaatatgtcttcccagatgtctgccggctttgagtaacagcagcatctatcccactcagatatctcgcaacccgctgcaccgtagcgggtagcacggcataccaattcacgagctttgcataaaaaggcaacctgatcacaccacctcgaccgctatcaatcgctgccaccatctcccgggcaacttcgacgggttccaggattggcgcaaagaaatgattcggcgcgcgcacccagtcgaacaacggcgtcgacatctgaccaacttccactagcaatgtcttgatcaacgggttaacccgaacttccgcttctatcgtccgatgcagcgcgctaagtcctgctttgctcgctgcgtagtctgacagtcccgcagcactcagttggcccagcacggagctgactgtgacaagagttcctccactctttgctgcgatgatcccaggcaagaagacttggtacagatggaaagccgctaggagattggtgcggattgtcttttcgaatgcgtccgctggcagatcaagcagtgagagaccgttgatcctggccgcggcacagttgataacgatcgtcggtgttcctaactgcaagatttttagcgaatcagaccccaattgaagcaagccataacgcgctatgaaaacaccttatccaaatatttaaatcactagaaccgcagtaatagtaggatgatatgggatcgaaggtcacaacgaaaacaaaagtaaaaaagcaaaacctacctcttgcaaaatcctctccctcgcaacttctaaagcacgtctatccgcgacgtcacacgtgatatacaaaacgccctccccaaagacctcatcgcggcctttttccggaacatctttaatatccagcacagcgacactcgccccgcgcatgctatacatctgcacaattagcagacctagcccactcgccccgccagtgatgaccacgacctcatgctcgaaatcgacttttcgcggggcgccgtaggcggcgcgctggttgataattcgcacgacgaagaggactgtcatggccgttgcatagcttacagcgaggatccaggctggatctgttgatggggttacatgggcgcgtaggcagaggacgaaaatccaggctatgaaagggttgagtagtgatttggagaggatgcttgttaggatgtcgattgtcaggaggctggtgtgtggattggtcgagccgggagttgtctggggtggtttggctgttgtttttaaaacttgaggatttgaagatgacattgcaatgtctgctttggcaataattctggctggagattggatgtcggggatgtgcaatgagacaacctggggagattccagacgcgtttggttttgcggggctgataagagataagacgatctatataattctgtcttgtaaaaagaaaaaggaagacagacaagtatctggagacccaaatctacagagtgatgaactaggaattggttggccaagctgggtttgtctatgaaattcactattcgttcaaaaatgttggctaaaatccagaaaatgtttcattctcactggatctatcccggtgcctttcatgacccactgctaaggaatatatgctaagactcggtaccgctctataaaagctcacaacatgaatagaaagttctagctatctttgtataaaagttccaaaaattggaacaaaggagatgagagcagagcccctttatatggcggacaacgggagcaccagacacgtacagtctgtatccgcagagatcatagcaaagcccctcaggtatccaaagatcgccagtcggtagcccgcatgtacatgcttcgtgccattcgcagcctagcctaggccgcctacagagacccgccagagccaaggataacaccgatcgccagacaacagcagacatatgttaaatacgaatctggagctgggtgacgggtcaacggttaaaaaaacacactcattaggggctacgatgtgcaatgtggacctggagtggtagtgtgaagaaggaagaaagaaggaagaaagtgggaggaggcaggtatttataccgtacaggctgtgactcaggtcgacggggaaaccacgatgggtcacgagttttgaccaaaagggaaggcacctgattgggaaggtgccgtcaggtttatgccagagctacatggaaacatttgaagacaacgtaagacagcccctggtatgaaagagacgagagaagattagaatagaaagaaaaaatgtagagaaagactggtctattagggtgtagtcaaggatctatcttttggagacgaaaatacgaaggcgtaagaaaccatacagaacctgtagagcatcacgccataaggacgaaattgttatagctgaggacatgaagaaagacataagatatcgaaaaagaaagtcagattcacgaaacatatttgatcatatcgagcatccctcgttcgttctattcttgacgaaaaagggtcatcgtaaatccacgaaactccccatgattgtgttagacagtgcacctccgacttaaaccagaacaagatcgggatcaatcaccactgcatacgctgacccagaggcgaagaaggcttcttattctgagcctgcttcgctgagccccggatagaatgactgaaggtaaggcaattcttatcctcagccatgatgtcaagatcgctcggggtcgacggcacctggaagccttgaccagcttcggggtaggcgcggtaatctccagggtcataatccgattcatgctgggatccaacttgtgaggactgagatggagacggagtgggggattgggagtatgatgactcgtcgtcggtgagcaggtcagagttcgaagaaacgaaagaggccttgcgagcacgtgcacctgcaggcgcagcatgcgatgtaaatctgcgcgtggctctggaaggcgtctgggaagttgttgttgtagtctggggagcagttgtggaagcatgcgtgtgaggaattccggtggaaacctggcccgcagcgatgccaccaagagccgccggggaagcaggagtgggagccgtatcggaaaccattgcagcaaagagttcttcgggattcatggaagtagcattgggggctgcggtattagaattcttgccgatctgttggtttaaacccatgtcgctagcgttcttgaatgatggttcctgattttcccaatcaagtaatgcagaacgaacgttttccttcagtgtaggtttggaaacccgattattgtgtggtgtcgcagaaggtgacagagtgaaatctgtcacgggttgcatgtcccggggaaacataggaaccgacggccactcgtttgagactctcactataagcttgactagcgaatcatgcgaaagagatgacagatacgcccgtcgttcctcctctggataataatttccaccaatttgaggttcagacacaggctgcttcttcggtcgttcgacttttttcaatttcgttgcaccattcttttgatatttggtctgggctgcctgacgttgctcaggtttacacttgatgcaaaaccaattcatctccgaaatttcgataacctcattatgaatgtttggactgtggcatttctgatgccacggagcatcacatgagtcacatagaacaatcaaattgttcgaggggctgtgtcctctgtaacaggcggtacaaactatattgacctggcggttcggacgcttccgctttttagctgccactttgacaggccctttgattgtcacaggctcagcttgtcgaacagttggttgagtaatacggcggccaggtcgagttcgatttgaatctagggcagtgctggcatttctatccgtttccgtagccccagctgttgtccaaacggcctcttcctgaggcagtgctggtgatccccaaattccccaggatatattgtcagccataagttccgggtgtgatgacagtggttggatcgcctcggagacgctttcatggtcaaatatgttgccctcatagacgttttgggggcgctccggattgatatcgggagcagggaggtccatgaattccgatgagaccctcatagtgagcttcctttcgaataagtatttccaaagaagtattggccgacgttctcttggaaaattagttgaacttgggagcgaaagaagagaatagagcaacaggtgatagaggcactatttgtgttcttctagggcaatccgagtctttcagcctactgcaaatcaaaatagacactgtagtgtttgccgagtgggcagtcgaacatagttggctcctctcaattcttcaattggaagtagggttggattgaagtcgtcgaatgaaagcctttgtatatgaatcacgtgatgttccaatacaaccttaaatgtctgtcgtcggtcgtttactgacgtatttcgcctaatgtgaggatcttattaatttaattgtagattttgatgcttttattcgtcatcaaagctatttcgttatctcttatgcggatctagtaggttctatatgaagaaggaatcgtctcaatatactacaggaacttacgaccgaaataacctagcaagtaatgattcatattgtagatttcttaatcatctttaatcttgttttccttctaaacagaaactagcagaattgcccaaggaaagcccatgagcgtatacatgtaagagatatgaccaaaaaggattaaaagacgccagaagaaccgagggtaacttggaatggctgtgatttccagttttcttatatacaggtttcgggaggtgtcgttcatggttctcatagattattcagggtttaggatatgaccccctcatccttcatgcgagcgatatccgcctccccataaccgaggacattacccaaaatctcatctgtatgctggcccaaagtaggaggaggcgtgcggataccgggcgtcgcttcggagtacttgataggggtgttgaccatcttgatgggaccacatgcaggatggtcaatttccgtcaccatgcctcgtgccaaaactgttcgtaacgtcagtgctgtttatatcacatgtaaaggaaatacgcagacttaccatgtttgtgattcagggttccctgaatgtcgttgacagccgcatagggcataccgctgccttcaaagatatccaaccactcctgcgtggtcttctgcacggtggtgctttcaatcataccgtcgatctccgcacggtgctgcacccggccactgttagtgacgaagcgggcgtccgtcttccactcggaaaagcctagtcgatcacacaacacgccaaaaagcctatcattgccaccaccgaagagaatatctccgtcgctggtcttgtagctccggtagggtacaatggatgctgggaggtgttagtttgggtattatacccaggagaatgttcgctgcttacggtgtgctgtgccccaacggccggaatccttttgcccactgataagtgcagagctagccaggttcgatagcgtagcgacttggcaatcactcaaacaggcatcgatgtgctgacctctaccagtccgaccccgagcaatcaaagccgccatgatggcattcgatgtgtataatccggtagtcagatcggtaacagcaacaccaacctttactggtgcaccatcccgagaaccggtaatgtgcatcaatcccatctcagcttctaccataacgtcgtagcctgcacggttgctatacgggcccgtctggccatatccggtgatactggcatagatcaattttgggtttatttcccgcagagtttcatagtccatgccgtattttttgagcccccctgggagatagttttcgactaggacatcgcattcctttgcaagcttgtgtagaatctcgacgcctgacttgtgttgaaaggatagaccgagggatttcttattccggttgacctatatccctgatcagtgctatgataatttttatatagcttcgagagaaggctcgtacagctaggtagtaagcgctctcgccagggccctttctggaagcatcttcgtactttgcatatggcggaccccaagcacgagtatcgtcgccgcgcacagggtgttcgaccttgataacttccgctctgtatttcgtcttgtcaatatcataggatcaccaattggagctgtttcatagctccgaaggttgatacataccctaaatcacccataatttgagtacagtaaggctaaaagcgtcagcttgaattacacagcctatcaagagatggactcacaccagccaaaacgcgtgtcatatcaagcacccggataccagccaaaggtagcgaaccatcgaccgaagctgcactggagtagcttcgtcctggcaccgtgcgccgcaaggcattgctaccccaggacaagccggatcgacgggcagcaacctggaatctgagcgcaaccgtcatgatgatatatacgaagagcggagcgaaacaaaaaaatgacgctcaaacaagaatccccgttaaatgaattctggggaaaccggcgaatctccgccaaaacgccgacgccgacaccgctcggaggggctgacgccgagggcacacggagcattttccttgtagatcatcaaccgcagctatgtttacaggtcttgtcgaaacgattgggagtgaggatatctttctctttgtaacgtgagtcaatcgctaacgtggttttactagctgtcacggccttggagcctattgacacctcatcgagcgggggcgggggaacgtcactcaccatctccgactgtgaggagatcctcaccgacgcacacctgggcgatagtatcgcagtgaatggtattttactctttcgttgtctataacacatgggatattgtctaaaagtgggctcaaggaacatgtcttacggtcactgcattcgataagacctggttcaaggttggctgtgcgccagagacactgcgacgcacaaacctgggttctttgcagacgaattcccacgtgaacctcgagcgcgccgtttcagccgatacccggatgggaggacattttgtgcaaggtcatgtcgataccgttgcggagattctgtctgttacgccggatggaaactcgttggtgttccgactgcagccgcgcgagagagatattctgcgctatgttgtggaaaagggctatgtgacccttgatggtgctagcttgactgtcaccaaggtcgtcgatgggcaggatggatactgggaggttatgcttattgcctatacacaggataaggtggtcactgcggcgaaaaagcccggtgactttgttaatgttgagattgatatcgtgggcaagtatgttgagaagagcgtgcagggatactttgctggaacctctggtggagatttcgctatcttggagaagatggtgaacaggatcgtcgatgaaagactcaagaaatagatcagagatacgaataccgaatctccgcaacttgacttcattgcaatattcggccaggacaagaaaaaatgagtcatttttagctttctatgtcctagaatgaactaatcggtacatttccaacatcctttgattatagcgaatacaaggcatacatctagaaattcgattagtgaaagcagaaaagcataaagcccgcaagtatatgcaagtattgagatcattctatagtcttagggtctatactcatcgtcgaggttggatagttcgacagacagcacagcgactctctgatcggatcaaaagcattactaagttcaatttaaggatggaggatgatggatgaatttgcaagactgcattatatgaagacaaaacctgaaaaacgcctatatgcctatcgggtatgtgacagtgacaagaaaattttggtccatatgacatggataagacgtgaagacggtgatcatttttgatacagtccactagtgtgatagacaagccggcacggtttgacttcttgggtttgttcaatcgcaagagccggctgtttaccaagcgatcaagtagaagctttcggaaaggtgtggtgtgatgactcgaagcagccatttactcctccatagactcgtccgaatcggcttcagagtcgtcatctgccgcttcaccctcaccttcagcgtccttgtcaaagtcatcatcgctgagccaatcttcatcatccatttcctcgtcctcgtcctcctcggctgcttctttgccactgcccctggccttggccttctcctgcttcttgcgctcaatgttcgccttctgcagcttctttctctgctctttctccttcctccgaacggcccagctctggtccatattccgcacctccttctcggatttcgtaatgaagtcatgccacatgatcttgccatcgcagactccatcctcaaccttcatcaagcgaaggcgcaagcgaggacccagctctacgagctttacagcccgcttctcaacaccggtggtctgggctggcttatcctggcccttatctgcagccttttggcgctgcatttcacgcttgtttaggactcggcgggtcgtgctctcttgaacttccacttcggcatcggtgtctagctcggtctcacttgctgatgtgtagcctgcagcggaggggtcaagcaggtaatcagcggcatcttcgagctttccaaggttaggaacggcggtcttcttcttgtcccggttccgaatctctttggggtccaggcgacggattcgtttcgatataccggtcttcttcgtggcaatggcgtagtgacggagagtcaagatatacgagtcgctgtctttttcggcaggctctcggttgagaagcatgacacggcggatggaagatagaggctgggtttgggggttgatgggagggaagagggattggaagatcgtagttgtgagggtctcgagccgcttcggcactttagaatcttcggttgcgcctggtgtggtgaagttgttcatgaccaagaggggcggtgtcttgtggtcttgtccgccacttttggggcgcttcatcgatctctcaacatccttgcacagcgaatagttctcgactttgaagtgaagggtaggtccacggggagtaacagcgagtcgcatatttgtgttaccagttgcggacttggaaaacaacataagatgagtgacacctaggggcccggtcataacggtataatctcgcagtctgttggatttgcgttcctaatattgcttgttagaacgaacgaacagaatagtgattgtgaaacataccttcaatcgcacagcggtatctggctccatcatacgacggacatccttaaccaattgggtcacactgctaccgacttgagaagcgcctattctaatgaccatagacttcggggtcttggccattgaggcagcgctgcccttcacaacagaagcattttggggcttctggtgagtgcgcttcttgacacgttgcttggccattttgatgtgagagataagaaaaataaaattggacgggaaaagcaacgaatactaaatcgaacagctcgaggttttttttttctccaaaaattaacatcagaaacagcgccggatcaacaatattgcggccccacattaaattatttcttttgagatagttgaacatcgacaacttcctttttgttcaaacacaaatcaaacatgccggttaccaagaagcgcaaggtcgcacacgcagtacctgctgcacctgttgaagacagcgacgttgcatcaaatgcaagctcttcaagcccccaaaccaaccccgatgttgaagatagcgcgagcgattcaagtccccaacccactgctgatgaccccaatgtcgaagctgcttcctccgagactgagcccagcacttccagcgctcccaaaacattcaaagaactgggtctgattgactcgctctgcgaggcctgtgacaaaatgggatacaaatcccctacaccaatccaatccgaatcaatcccgctggcacttcagggtcgtgatattatcggattggctgaaacaggatctggaaaaactgctgccttcgttttaccaattcttcaaggtttgtgcatatttgatgacatgtaccttgtatacaatactgacgagtcttctagcactcatggaaaagccccagccgttctttgggctcgtaatggccccaacccgtgaattagcgtaccagatttcactagcatgcgagtcccttggtgcaacaatcaacgtcagatccaccacgctggttggtggcatggatatggttcctcagtcaatcgctttgggaaagaaacctcacatcatcgttgccacgcccggcagacttctcgatcacctcgagaatactaagggcttttctctccgcaacttgaaattcctcgtcatggacgaagcagacagactcctcgatatggatttcggccctattctcgataagatcctgaaggtcttgccgcgcgagcgtagaaccttcctattctccgcgactctgagctcaaaggttgagtctctccaacgagcctcactgtcaaatccggcccgcgtttcgatctctaccagcaagtacgctaccgtggaaactctccagcaaacttatatccttcgtccttataaacacaaggacatctaccttgtatacctcctccacgaattcatcggccagtccgtcattatcttcatgcgcaccgttcacgagacacagcgtgttgcattcctgctgcgcggtctaggcttcggcgcaatccctctccatgggcagatgtctcaatctgcacgcctgggagcactgggaaaattcagatcgaaaagtcgcgagatcctggttgccaccgatgttgctgctcgtggtttggatatcccctctgtggactgcgttttgaactttgacttgccaaccgacagcaagacctatatccatcgagtaggccgtacagcacgtgctggaaagtctggaaccgccatctcctttgtcactcaatatgatgtggaaatctggcaacgtatagaggctgcgatgggcaaagagttggccgagtaccctgcgccaaaagatgaggctatggtctttgccgaacaagtcagtgcttcacagcgtgacgccattcaggcgatgaagcattacgacgagaagaaaggggccaaaggcaagggaaagttctcgtttaagggcaagcgaagtcgcgatgccatggaccaggaagagggctagaatttcattctggctcatttgctgttctctgtacatgaatagatggtctattttacgaatttggggcgtttaagcatgtaatttgaaagaacccatagatttcattactgcgtcaaaatgatatcgaatattttcctggaccatatttccggagatccataagagttgaagaggtattcgctgcctaaagccgcacaggctagtgtaataatttcaatacggcctagagaaacagcggtccctaggggcatttgtcagggccaagaatcaaatttggactagggaatctattaggcgctgcccgcctcgctaacagcgttggcgacgcgagtggcaaggtcgtccgcctcggagcggctggcagcctcagcgtacacgcggacggcatcctcggtaccactggcacgggcgaaactgcggcccttgttgtatcgagactgaagagactcaatagtgctctgcaggccagcgggagactcgagcttacgctcagcatcatatgccttgaaaatggaacggtcattgacctcgacacgcacgaggcgcgaaggaaggtcggtgtaggtgccaagccactctttgggtgaccagcccttgtgggcgaggatggcctccacaagaagagcgtcggacaaggcatcaccgacagcctggttaatcaggtcggtcagggcctgaaggctctccagggcgtgctgctgcgccggcgattgaggctcggtgttcttgatgacctttagggcattctcggagaaggtgacggtaccatgtccgttggcctcaaagtagacgccaacatcgaaccgcagtgcggcgtggtggaggtgcttcacgccggtgttggtgcagataatgggcagcttgaggaccttctcaatgtaatctgtgcttgcgccgttggcataggcggtctggacaacaccaattttcagcttcgaagcaattccagcattacgggcaagatcgccaatgaaagatgccgcaagggtggcaatgcggtccccgtctagaagacggaacacgttgctgtcgtcctggaagtagtaaacaatacgatcggcgtcaccgtcaagcgaggcacatcgatcgagcacggcagctttggaagaaggaggagcacgttgcttggtcttaacatagtcggcaccgcactaaatgaagtgttagtttgatcaaaattcgtgtgttgggcaggtggaagcatacatcagagttcagggcgtcagggttgatcacatcatcgttgacaatcttaatatcgattccagtgaggtacttcatcagttccctcaatttaggtccaccgacaccattggcacagtctacagtcaaagaaccctggaccttgactccccgcataaccttctggaaggagtttgcaagcttctcatagtatccttgctcagtcggctcgccatactcatattgtgttccaagtgtgttcttgcagcgaacaacataatgaagctgcggggtggtcatgtatttaaagtccacaaactcgacctccgtcgcggtaagcgcggcattcagaacgcctaccagacgggagccagaagcacgggtgtcacgagcgaagaccacacgagcggggttggtcatggtcacgtcgatttccttgacgagttcgtcgtagacatcggcgatcttatccaatggggcatttgccagttttgtcgcgtacgcctcccactcagcctagttatgacagtgagtacgtattccaaattcggtctttcagcgcaggccaatcttacttcaagcatctcgccctaaataaaatataaggttagacttgtcctaatagggccggttctatggcagggctcaatgggttaactcaccatagggtcaaccaacttgacaccattgtcctccgcggggttgtggctagcagtaaccataactccaatccattgtccgctaagcttcttcgaccgcaggcttgcaagcaagcccactgcaaaaacaacggtgttgaggaggtcactgcgcagccagattggtcagaacaagtcggcgtcaacaaaaggatgatcgcggggttctagagatgtggaggcggagtggatcagccatgtttgaagaaacttacgctttcatgcgaaactataagggagagaatgaaagttagccgagtcgctagagtaggatgttcatacaaacatacccctgctgtgccatacccaaataccttgccctcgggctttgtgtattgcaacgccgcatcggtgattgctttcttgacagccggagaggccatggcgcaaatgtgtgattagttataaagcaccgtaataggtttcaagagaagaggcgcttagaagcttcaggtaaagtcgaagtcgaagaagaggggagtactcgaaacaaaaaaaagcggctgaggggtgagacatggtttattgcgacggccttagcggtgagcgaaaggtggggaaatacagaccaaagcacggcaggggacgtggtaataatataattacccgcattagacgccgtggaaattaactgcaacgaaaaacattctggtggggagcactccaaccttcattactgctacctccacgtctaagctacagtcaagcatgacatattagtatgtctatgctatcctggggatgtatatctatatataaagatcgccgaattttgccgaattttgatcctcttcatgccttgagcctatgcgccgcaatatcgtcctgtgtgtccctgatcaggaaccttcgggaccaaccgatgcattagtcacgaaaacgtattgtgtcgttggaacgtgggggacttacgaataccaccacacagcggggaccactgtacccagatgccagaggctgtgcgcgtcaatcaacccattccaaggggggaagtcgagcagctccaaactcatagccatgattatccacgccacaatcataccaggccaggcggtccaagacttcaaatgtttttggtatcggaagatactgaatccggtccacataaggttctggataatgccaaccactacgttcgctatcatattgtaggtgtagtcccaagaccaaaaggtaagataagacacgtgcaatacatatagcagaacgcagatagcagtccaaagtcgacgcagagttggccgatatggaggattttcaaggtccaggcggaggattcgaatgacggcaaggtagagaccaaacagcacgttggcgccagccgcccaatagtccagtttctcggtcagggggaaatcgcgcatgtgaaataacatgctgaaactccagcttgcgagtccaatgtatccaaacatcatgtagtatgggcgaagtgagtgccaactggggatcgactcttggatacgggacatgccgtgccagtgggcggcgaagttgaagaacgagaagagcaccgagaagggctcctgcatccctaggagcctacggaacggccatttcccgtggaattgtacaatcgggctgatcattggaggatcacgcgaaactcgacggtcggtaatgacatgttgacaggtgtagtcacattcagcagggcaggtccatagtagcaagcggaggtgcagcgctaaatagatcagcaaaggggaaacgcggcgaacggttggaacaatgatttgacatacgtagcactgaatttccgtgctgacaattttccgttttacagacctatggttgttagtcgtttccaagggtctgttggtcgcgggagtcgtacctggacacattctttgaagtcggggaggtggtctcctaatgacgcgttggacctgccaatgagggaggctagaaaaacgagagcgaaaagagtgtagagattcacttttcctacgcccagattcattgtgggccaaaagattagctccaaggtcttaggcgttcaacgcgtaagctttggggaagaatgacaggtaaggcggagctcccggcatcgaagagcctccctcggtggtcttggcaagatcaaaccagctcttttgtttaccccacagcgacatcattgatctactttattcaacttcaatgaatgtggaattggcattgtttatcatccttgtcaaatcgcgttataacttggagatcttggtagttcactcgaaaggaaaggcagggccaatggcgcaagtaatctactttgaatattagatatcgtcaattgatgctagttatccttgaagaagcgctattcttcacatagatgccattcaaatagagtgcaggtatgcattagtataactacgtagaactccgtacaatatagctgtacaactatgccacgcagatagccctatagaaatgagggcaagtagtgtcacgtgtgtcacgtgcgtatacacgtgatctcccagtacggctagtgcgggcggggattggagttaagcttggcgggcgggcaaataatccagaaaaaaaaagttacggatcgatctctgttggacttttatctttgacatccttcctattgacattttttttactcttgtcgattcttccttttcggcccgttctttttttcgcacagtcaagatggataccggatccgatagccctcagggcatcaccagcagtgctgatcgcatggttggcatggagcactctgaagtccgctacttcactaggtacgctattctccgttgattgggtatgttggaagttgatgctaatacatttatagttacgaccaccacggtaaattatctcgatccgtgatagcgaaatttttacgtgctttttactaacggtcattttttgggctgcaggtatccacgaggagatgcttgtaagtacaaatacactggctagttgactatttccagtctctaactttcattttctactttctagaaagatgatgtgcgcacacgctcctaccgcgactccatctaccaaaaccgccacatcttcaaggacaagatcgtcctcgatgtcggctgtggaactggtattctgagcatgtatgtatccgcttgattaacaacaccgtgctcttagatatcttgttgactgttttgtttaacaggtttgctgctcgtgctggcgcaaaacacgtcattggtgtcgatatgtcctccatcatcgagaaggcccgtcagattgtcgatgtcaacggactgtccgataagatcactcttctccagggcaagatggaggaagttaaccttcctttccccaaggtcgatatcatcatctccgagtggatgggttacttccttctctacgagtccatgttggataccgttctctacgcccgtgacacctacctcaaccccggtggtctgatcttccccgataaggccaccatgtatgttgctggtattgaggatggcgattacaaggatgataagattggatgtaagcaacaagtctaccctgaagctgtttttcttcgacgtactgatcattttcagtctgggacaacgtctacggatttgactacagccccatgaaggagattgctctcaacgagcccctcgtcgatactgtcgagatgaaggctcttgtgactgatccctgcccgatcatcacctttgatctgaacactgttaccacggccgaccttgcattcaaggttccttatgccctcacggccaagcgccccgacttcatccacgccttgatcgcctggttcgatatcgagttcagcgcctgccacaagcccattcacttctccactggccctcacgccaagtacacccactggaagcagaccgtgttctacctccgtgatgtcctcactgtcgaggaggatgagcgtgttaccggctgggtcgagaaccgccctaacgataaaaacaagcgtgacttggatatcagcatctcgtacaagttcgagacccccgatgccacccgcgctgctgagggtggttgcttctaccgcatgtaagttcttgtgctgttttgctttggttagttcttgaggtcattatactaatgcatcgtaggtgttaattttcttccacttttctctaatttgatgtcattgggatgtacaactgtacgtttgcacggtctaagtgaaatattttcgtctcgcaatgcatcctggcatgggcatgtatgaaattgcccgaggcgaatcggacatctggtttcgcctttgtttatttcggcgtttaattctcgggaggcaggaaaaaatgcattttgtggcgcgaacggagggatataattctgaagctcctcgaatttccaggtagatacccgagtcgatgcttagtctagcaaactccaacgctcttcttctggacatgttttccacgctacgatgtagacgacaccattggttgaaaaagctttcagcgacctaacagaaaagaatataagatctgcagggggaaattgtgccaagaagaggccctcatcggcaaacccacggcaacaaatccaaagaaattatcagatcctcggctccttgatggcccccgcaattaccggagctactttagtgtgccatctcctttattttcttgatttcccttacccttgaccctcttttttttatctgatcttatattcatatctccttcgtactaccatcccaatgtcggcccctggagctggtcacgaattccccgcccaagaggtttcttggcagaagcgcgatgtgctattgttcgccaacagtattggtgtcaaggccgatgagctgcacttcctctatgtatgccacgagccacatatacactagtctaaatattattctaactggtatccaggaactccacccgaacttctcggtcttcccaacctattctctcatcctccgtatgttgatcgcccaaggaatggtcgggcagcactaactccaaagctattagcattcaagctcactgatcaggaggtgactgatttctatgcccgccaaaaggcagttcacattccaggcgtccctgacctggaccatcgtcatggcgtcgatggtcagcgtaagatcacgatcctgaagccgctccctaccactagtgcagggcgtaagtttgagctacgcgataaggttattggtgtctatgataaaggcaaacctggtactgtgatcgagaccgagcagtctattgtggataaggagagcggcgaggtctacaccaaggtcgtgagtagcggtttcctagtcggacagggtggctggggtggcccgaagggtaagattatagttcccctatccagcatagagtatcaactgacatattcgagcaggacctagcaccgtcaactatcccccgcccgagggcagggctcctgacgctacccatgttattcagagcaactctgagatagcccacctgtaccggtaagtactcggtgcaaacagaattcggcttgtatacttgaaacgtctgatgctgactccttgcccagtctcaacggtgactacaatcctctccatgccacaccagagcccggcaagaagatgggctttggaggtattattgtccacggccttttcagctggaattcagccgcgcacgggattctgcgtgaactcggtggtagcaaccctgccaatatgaaggagttccaggctcgctttgcctcgcccgtccggcctggtgataagcttaccactgagatctggagaatgggcaatatccaggatggctatgaagagatccgctttgttactaagaatgacaagggtcgggttgtgttgagcaatggccgttgtctgttgaaggtgacgggggcgaagagcaagctgtgattgattatgccaaagctcggttcaatggcatgtaattggactctaaatacatacctaggtatatagcaaataccttctttatcaccacgtgccattttcgtagaaagtgaacttattgatgtccgtatagttccttatatatatatgcacgtgaccgcaacctcggttgtcccaccctacaaaaattggccaagcactgctacatatctcctcgttcttgaccctcccttctttctctataccgattatgagcttcagttggcgcacagcgctcaggccgagtgggctgtggagtcgcgccgggtaggaactcccattcatgtcgaattgaacgttcaacgctgaaaccctctcggattagacccaagagcctgagaccccgctattcccttgttagtgatttggtatggatttagcacatcatttacacccgagtcgattacaaaaaaaactaactcgatctctctgttctgttgttcatagacaactggccaccgacatgtcactggttcctccagattgctgaacaccaagatggcctcgaatggccctcaggttgcttggtctaagtccgacatagtaacctttccaggtaaggatagaaaggatctggaaatcccgttaaacttgtaagtttgttataagtccaaggaaggtgaatagcagctgacttcgattttgtagcggtctttttttcctcaggttagtgaccaggatataaaagcagaggcttgacctccacctcttattgacaacttggtgcccacgactagagaaaactgccagtgtcccaaatgtattcatccggatacgatgcagaggataagcaacactttctcggtaggaaaattacggctccttgtgattacttgttatctaatactacgcctacagattccgcaaaacgtcaagatagaatcaatcgagcacagtgacaatatggtcaagatcaagtgtgagagacgacatgcataactttgaattaccatcagaactaacaccgccacagggtctgataatcacacgggactttattcgtatgattggcttcgtgcacactcgcaggacttatctagcgttgaaggaaccaagtcggtgccatatcctcaatcggcattgcaaagtcccaggtaagttattcaaagccaaagaaccagagtcacaggattatgttaacaccatggaaggcatttcaccccagtcgtggattcagatcagagtcccagagtcaaatatgacgatgttatgtcagacgacaaatctcttcaaatatggctgagccatattgtaagcccttctgtcttgactccttgatcaaacttgctaacaattactaaagtgggatgaaggattctgctttgtagacgacgttcctatcaacccagaggcgacccaatctctcatcgagcgaattgcgttcatcaggaacactcattatggtatgtaccctagatcaacgattcaccaatggctcattcagctaacatagcttcaggtggcttttgggacttcacagccgatttgacttttaaagacacggcatacaccaacgaattcctcggtgctcatacagacaacacttatttcacagatcctgcaaggcttcagctcttccatctgctatcccataccgaaggatctggaggagagaatctcctaattgatggatttgcagccgcaactcaactactccttgaaagtcctgagcattatgcccaactggtaaagcataggcacccctggcacgcaagcgggaacgaagacacctgcatccaaccatccgccatggcaccggtattttcgattcatccggatctcaataaaatgtaccagatccgctggaataactatgatcgtgcaccaaagaccaactggtcggcatcggaacagaccgaatggcaccgcgctgcgcgccactataatgagatattgcagaccagagaagtgtggacgaagctacaaccaggatcggcactcagtaagttctttgtgccattgtgatggctacttcagcttacatattttgtcttagtattcgataactggagaatgttacatggtcgctctgagtttactggaaagaggcgaatgtgtggtggctacggtatgtatttctgatagcgcctgttaatgattttgtactaacgaagtgccagtcaacaacgatgactacatttctcgacttcgcctgctcaagttcggccggaaagaggtgctggacaacctgggcaacgttggagacaatccccagaatccttattggttcatctaggttctgtggtacctgatgcaagataaatccacagaaaatcacattgtataaagcaaaagtgattcaagtacggagtaactagatagaatcgaatcgcacttgattataaacttagatcgcatcacgtgatcctctatggctgacgttgttggagctcggccaccgacagctcttcctctttccccatcttccccccatcctttccaatctacccacctactgtctcttcatttccgagctttttaatttagttatctcataattcgcaatttctcgattccgccatgtcgactcttgaggacctcgaagaccttgagcaggagcagagagagaagaagcaagaccagaacgatggcgatggcaagaagcccgaaggtgacggcgatgccgacatgacagacgccgataaaaaagacgaagaagaagagatgctggacgaggatatcttgaactcaagcactgcagacattgttacgcgacggcggatgttggagaacgagatgcgaatcatgaaaagcgagttccagcgtttgacacatgagcagagcacaatgagggagaaggtgaaggataatcaagaaaagattgagaacaacaggtgtgcattcactagtccccgtattcgctgttctgcaagcccgcggagctcggtggccggcttgcggatcggcgaaaagacactttaatatcaacagtccactgacattttcatttgtgactatataggcaactaccataccttgttggaaacgtcgtcgagctattggaccttgatgtggaggcagaggcagcagaggaaggagctaatatcgacctcgatgcgacccgtgtaggcaaatccgctgtcatcaagacctccacccgccagacgatcttccttccgctcattggccttgtcgaccatgaaacgctgaagcccggtgacttgatcggtgtcaacaaggactcatatctcattctggacacactaccggccgagtatgacaaccgcgtcaaggcaatggaagtcgacgagaagcctacggagaagtacacagatattggtggtctggataaacagatcgaagagatcgtggaagccatcgtatggcctatgaaggaggcagagcgctttaagaaaatcggcattaaggcccccaagggtgagttactttcctccttcccctgtgcttcaaagctaacattcattttccttcccaggtgctttgatgtacggacctccaggaaccggtaagacacttctggcccgtgcctgtgccgcagagacgaacgccacattcctcaagctcgccgggccccaactggtgcagatgttcattggagacggtgccaagcttgtgcgcgactgctttgccctggccaaggagaaggcgccctccatcatctttatcgacgagctggacgccattggtacgaagcgtttcgactcagaaaaatccggagatcgtgaagtgcagcgaaccatgctggaactcctgaaccaactggacggctttgcatcggacgaccgtatcaaggttctagcggcaaccaaccgagtcgacgtgctggaccctgccctcctgcgctccggtcgtctggaccgaaagatcgagttccccttgccgaacgaggaagctcgcgccaacatcctgcagatccactcgcgcaagatgtccgtcgaggacagcgtcaactgggccgagttggctcgcagcacagacgagtttggcggtgctcagcttaaggctgtttgtgttgaggctggtatgattgcgctccggaagggtctgagcaagatcggtcatgagaactacgtcgatgctatcgctgaggtccaggctaaaaagaaggataccaacatgggcatctacgtttagagtagacggttttcctttttatgtcccgatccatacactttctctgctttgttgcctctttgttccgagtcatctcgtgtatgtatgctccctcggcttgaatggaagccggtaattcgttatgcatgaatggagaattcttattacgattttctttatatctccgagtaaatggcacttaatcttttaccatgccgtgatactctgtggcggagttgtactcgtagacatagatattctgattaaagtcgtgtttgatcactggcattgtggcgtagaacaataactgccactataaccattgatgcatagtgaataccacaacagcctagaaaatccccaagaggaaaaaaaaagataaaaagacacgcaaagatgcaatagtcataaatccataccaacaaccgtggctcatcacacacacccgcacaacttccaccatgggttttatataaaagaaacaggaaaggagttagaaaaggagaatccaaagagtcaaagacaaagaacaaaaggctccctaatcagaaagccgccagttccaagtctcaattcttaccctgggtatccttgagagtaacaatgcgattaagcaccaacttctcatcagtcgactcgcgatcgacagcaaagtacgcaacacgcattccctggaagcgaatcgagtgcttgtgctcacccggctccgcagcaccctcctccttaggccacggcgccgagcgggagatatcccggattccagtctcgaccatggcatccttgaagatctcctcggagtccgggttgatatcggcgaggaaaccggccgggtgggcagagggatcctctgacttgaagagcgagttgaaggcgcggacttcggcgcggacggggctgttgtgcgcggccgactcgccgatccagtggatgaaggacttgggtttcgtgggggcttcgccttcggcgggtttctcgtatttggcgtgcacgcaggtgacttcgccggtggcagggtctgtttcgaaggaggtcgccgtgatggggtaggggactttgaggaggccgacggttttgccgggggcgaggcggaagtagtctggtgagtcaacggcgcggaagtccgagcgctcgatgtagacggtcttcgtgaaggggatgttgtgggtgccgaaggctgggtctttggagaaggggcagtcgatgagctcgaggtggtcttccgggaggtcgtcgatgatgaccttcagcggctcgagaacgaccatcagacgtggcacggtggtctcaaggtactggcggacgatctgctcgaacttggtgacctggacgttggtggtgttctttgttacgccgaggtcgttgacgaaggagaggatggcaccggggggcacgccgcgacggcgcagtgcgatgagcgtgtacagacgtgggtcatcccagtcgcggacatgtccttccttgacaagctggatgatcttgcgcttggagagaacagtgccggtgatgttaagacggccgtactcgcgctggttggggcggtagacctccagcttatcgcagagccactcgtacgagacgcgagagagctcgaactcggttgtgcacagtgagtgcgagatttcctcaatgctatcacacaaacagtgcgcgaagtcgtaggttgggtaaatcttccacttgccgccggtgaggtggtgctgcttgtcctcggagcccatgatgcgccaggcgaacagatcccacatctgcgggttcgggtctgtgatatcctgcttcatgcgcagagctgcctcgcccgccttgtattttccgtcgcgcatggcacggaactcggagagggactcctcgatgggtcgtgtacggtggctgcatgagaagcgttcaccgccgcgctggccgccctcgatctcaccacgctgggccttgatctcggacttgttgcaatggcagacgtatgcgccatcacgcttgatgaggtcctctgcgagctcatagagacgatcgaagttatcgctggcgttggtctcacgcacaggtgtaaagccgagccatgtcacaatctcccgaatggcattgtagtaccgctcctcctcgccttctgggttggtgtcatcgaagcgcagaatgcactccccaccgtggtactttgcaaatccaaagttgatcgcgatggccttgctgtggccgatgtggaggtatccgttgggctcgggtgggaatcgcgtgcggatcttgggcacggtctctgaaaggggcttttcctggtacacgtcgtgcaggaagccgaccttgaacatggcttcagggtcacggggtgcgggagcatccttggccttgggtgcctttggctctccctttgatttgggctggtcctgtcttgctagcttagccgccgccttcttagccgctgcggcctctttcttctcctgactcttggacttcttgggtggatctgtaggctcggtggcttccttgggcctctcaggcaggtcgacaggctttgcggggtccattgcgacggataacaattgggaaagcgaaggtgggggatatttttttctcacgaggggctctttgtattcaatgcttatcagttgacattcgcttatcggtccgattcagcccgggatgagtcatcttctatactgccagagaataccgacctgggcccctggatgccaagtgactatgcatagggcttcagggctatttttacatataatgagtcatttcatatgcggttcaattcttaatttgtgatcaatactgtacaaatatgatacaactatgatacagggagtacgcagactcaaaaaagacagaaagaagcacagtgcacattaaccttccaccgatgcgccaataatgatacaacaatgaaagacagttcgaatgaccagatccaaagcataccggatcattatgcaacgctatccccgtacatctgacacagcaatgcgtgtatcatgaaccctgtacaatgagataagaaccagccaactaaatgatcggaatgaaataagaaaaacaagagataagaaaaagagaatacaacaagtgtggggtatatggcgcagaatatgtagacaagaaataggaggaaaaaagggatcaagaagtagaaagatcggggtcagaaaagttgtttaatgtcaacgagctctgagttgcccggacggtcacgctccatatggaaccaccagtcccggcccgttttgtggttccaggttccagtgcaggtatccttgtcccaaggcaaggccgagccctgtacactactcataggcgtgcttggagtcgtgggtgtcgttggagacgtacccatcacagaccgcccacccaagcttccccagccaaacctggaaatggtggatgcaggcgacatgatatcctcgggaggtgggataaaggggctcccgctgccgaagcagttgacgcccaccccagcagcatacaacagtgactgattcgaggctagcaattgtttccacccaatcaagccaccgtctgcctcctgaccggtgatatcaggacggaggatgaagtgaggaattgatgcgcccgttgcaggatcgcggaaaccactacggcccatcaaggttggcatgcggaactcgtagaccgttttggggccgctgcagtcattagcctcatctttaaaccgctcgcaggcagcccagatcccgtagtcatccatttcctgctcgggctcttcttcgaattgggagttctgcgcgttgtccggcacatacgtgtccgagtaatcttggatcagaacccgcatcccggcctcagtgtccttagcggccatgtctatgaacgtctgggcacgaattcgggctgaggtcagattatttcccgccggtagagcgagcggtcgagtattcacggaaccgtgggagctgcggggcagactgtaccggtctggtcggagtaaggcttgtccctttaatacaggccggcagacagcctggagggcacctgggggttccacgtcgcagggtgcgcggagagcttccagttgagggaaaccagcggagatgatactttgggcaagatgatagttgggggtattggagggttttgtgggtttctggaaggggagggtatcaagctgggtgagggctgtgcctgggtctggacatgccacatcccagtggaggtattttaaagtcgatgaggccaggataggctggaagaccatatgtccgtctggcaaagttggacacttttccgtctggactatcttgaaccgctcgagtcctcgtagtgacgcgaggagtttggagatgactagcagtgacttgatgttctgctcgactaggacgagtgtcttgagggagagtgattcgggtcgcgacgtgtactgtgaaagaccagcatctgtaatcccgggcaggttctccaaccttaatgactccaagggtggcagacacatcaatgtgctattatcaaaggagtctttgttgaaagaggtaatgcaaaggtttcgcaatgagggaaggagattaaagatgcgtagggagatgctaggttccaatgcgccatttccgttcaatccataaagcatcagtgtctccagatttgtccacgacgtatggtaatccagaaactcgaacatttgcgaaggacccagactcccagggcaggagtcgtcgcgcggagatagctccggcgctcgtgcggcctcgcccaaaacccatgtgtgctctttgagctttttccgggtcgacaaagcatgggtcagacgatcgaattcatggtgatacggaatagacaagcctaataggcgctctaagttcgggcacaccataaccacggacgcgaccaggtctcgatactcctgccactgggtaccttgtttcatggtaaagagcaaatctaattggggcacgcgtagttcgtatacaaggttggccagcaactttcgttcgcggagggttcgtctcaagagcttcagacgactccctcttttgaggcggtatttcttgagttgagccggagaatcatttccaacgatgtgtatactgtgatatctagtatggtatgttcagtcagcaaacactctttggacttcttcctaaccctgaattaatcaagggggctggactcaaactcacagaggtcctctaacggccttttcccaggaccgacaggtcaaggccaaggcgtgtaaatcgcgttgaaaacacgtcgtacatcctgtctggtgctgccctttgtgcaactcttctaaatggtggattatcacttcgtagacctcgtgtggtattctgcgttgaattggctcggttaacttgggaagggaattgaccgagtcgcattgacggtaagatgaagccggggacgatgggggatatgtggtcggcgcggttgacgcggtatagttggttcggtaggaggataccgaggaggttcgtgaatgaacggcatcgtcgacatgattcccggggatggaattgtaagataccaccggggtctctgttctaattgcgacaacactcattgtgaatgtgatctggcatcggagcaaacgacgcgagacgggaaaaagcagtgtaaattcccaatagggaggtggaggggttcgggaatgtagggaattcggaagatggcgtaagatatggagatcggcagattccaaccgtttttatatagtcacacaatacacgtattgagcaatccgatcgagaaacgaggcgaagagaaaagagaagggaagaatcataagggatatgtgagaatgaaaggatcagacacgctctaagaactagcattggataatcaaaaggaaaaagaaaaaaggacaagaaaagaaggaaagactattgtcagtcgatctcccccacatcagggaatgagttgaaggtccttacccgtggactccattcagactgtaagccgtgcagcatgcccaagtgtaggagcggagacgggaagaggcggttcaggggttggccctatgatttttggtacagccggatgtgggaattagacatatgtagtgtttatattgtacattactacagtatagaatctttgaatatctaaaatcaagaactgcaattctctgatatccctacaatacatccaaacctccgtacacaggacacgccaaggaacattgaatatcaaaaacgtccgagggttcgtggacgtgaccacgctatggctccgttaggtttagcgcgatgggtcggggcagttttagtccggttaagtgcattttaccccttttccgtgtttttcttttcttttctctttgctgttggttatgttgcgcgccgtgatgttattacatgtatcttattatctgttatctcgctatctcgttgcttttatccccatttagaatgataacactgtaaggcgtttcagtttatattgttcccaggttatcccctttctatatctaaacggcccaagcgcatatcatcctgcaggccaatggaataggcaattgggcggggacgccaattcttacttttgacttcggctttattacggagtacttcagaatggtctgcgcgtcactgcatggcataacgggatcgacatatatatcacttttataattatcagcatgctcccgaatataaccactatcacatagtctaaccttggatcgtacatgttgtacctattattaaacttaaaaaaggcatggttcgactcaatcccctagcaacaatctcccgggacaatataaatagcaagatcagcgaatcggtcattcacatgtaaaagactcaacggatagtacggaggagtccatctacataattccccttgacatgtaacaatgtatatgtctgtatgcgctaaccaaccaaaagcggaacgctcggctatgtatgtatatttcaatccacttcaacaggtcggaacatggaagagtctcacgactgaaactccgatctggtggagacactctgagggtcctaagtccaatacggccaattgcaccaatcgatcttgttgcgctgacgactagggcttgatagtgccactctcggggtgttcctaggttcaatgcaatctcccgtcataccatggaatatagcatagacaattaggggtggatattcggtagctgtgagagaacacatgtcgtatgatggcaacggtccttcacggagtctgtaccgagctgctccataataactaactatatactacacagttagtcactaccttggacgtggttcggacggaaagatgacgaggcaagccaagatgccgccgacgccccatacaagcgctattccttattgtcgagtagaaaggctaggtgtcattcaaaggaccttactattcagagcacgtgagagcatctcacacccatggacagaccatggagaccagtacatggacgagaaacactaatgactctgatacgaacatcaaagtttaaatgcatgcaagggaggggctggatctagatagtgtttcctagtgctgtgtacttgtacttggtgtttatatttagcatcaacctcaaaccctcacagtttcgccttcgccgtctccttctcatcccccctaaagcgataaacaacatccccaaaactgcccgtaggaaaaacataataccacctcaactccacagtcccagtattaacaatcccatgctcggcatccgaaggaataaagaccgtactcccagcgcgtactttgctcacaaccccgtcgatagtcacatcgccctcgccgtcaaggatatgatatatctcagcctgtgtgtggcggtgcgcgcacaggtggcctgtcactggggggcaggttgctattcctgcgcacaggtgtgtggactctgtttgcggggatgagattaaggtgtgccaggatatatcgccgtggattggggctgggaatgtttctggcgatgttgtttgtgtgtaggtcgaggggaggattgttggtttgggtctttgggtcatttcggtttttggatatggatagactatagtgggaggtgttgatgtggttctggtttgcgggggggagggtttataatttatcttctctgttaggttgcgccttccatatttacatgtgttaggtagttctcaaacggaagaaacgaggtggggaaataggaagtggcagatgtagaaggagcgtggttgtcgaggaaacactttcctaaaagagaaagtacgtcccaccgaacatgacctacactccgaccttggaaggctgcatgcattatgtgcctaaaacagatcgcgggataagaggagcagcagtgataggaaagtatcgcaagtaacaaagaactccaccgctaatggatggattatatggaaaaatctgacattcgactagaacagcatatccgtactcccatgcaaatgcggaagcagatcgagccccataagacaccgatgccagtctgaacgccatgcaaatggacctagaatgaaaccttctgctacaactcggttatcctcgaatctgcgtagcttcaatcaacctggacatgcaaagaaaaagaaaagccgtgaggaaacatcctcaaattatcaccgtaccgtgctggaacagaaaactccacgaagagcaagcaaagggagaagcaggaaagaagaccgaaggaaagaccggagaaaaacgtgcaggtatcgaaattcaggacatcaatcccagcggatagagaataaagttatcaacactgtgccggagacaggatagaagacaaagactaagagaggtcgctttgactaatcgccccagaacatgatgactgacaataaaggtgcacaatgaagattacccaaacccaactccaccaaacacgcaagaaacccccgggatttcctctgaaactggacatgaagaaaccgaccgaaaccccggggagagggggggtatgtgactgggagccggcctaggaaaccgacaaaacaaacgagcaggttgtaaccataacaagtagcgagtctcaagattagtacctaggagtggtcctacgatcaaagaatgatcaccatctcaacccggcgtccgacagaacagtaaacagactgaaaggatgaaggaaagaaaatgggggcaaaatccgcagaaacaccagcatgagaagggaacgggaatcagaaacaagacgacgacggtaaatgggaattgaaagggaaagggaaacccatatttgcgggttggaagtgatgcaatccgaaggcatgtacaagacaagacaaagaaataataatgtatgccagatcaagactccattatcatgcagtaggagaaaaaaataaaacatgatcacatgtcggtatcgtcaacgttgaaaatcccgggttcggtgccgtcgtgcgtcttctggacgcctgtcatgcgctggtcgaccgagttgccggcacggtggcctcgtcgccagtgatcgtcgtgcatggagtcctcttccatatgatcgctgtcgtccataaggtgatggtctatagaactttcattcacaaaggtgaagcccttgaaattggcttgcatcccgggggataagggtgtggaggctggcatgaggccgttggcgagattcgcggcgcggagattgagcgagttgttcagctccatagcgtttgtgaattcgggatcgaagttcgatgtgtcggtttcagactgcagcagcggcttgaacggaggaatcacttccttgcggcacagcgtttcccagttgatgtcgtggaagaatgggtgtgccatgagctccttagcatcgccattggcgccaagacgatgcttgggattccggttcagcagacccttgacgaagtttcggccctcggagctaagcgcatcacgggggaaccggactttgccgaatgcgatattcttatacatctgctgagtatcctcggcgtagaacggactccagccacagcacatctcaaagaccaagacacccagggaccagaagtcaaccatcttcgtatatccttgctcatcgagcaatacctccggagccagatattcagtggtaccacagaaggtattggtggtgtcgttttgtgacaggtttgccttggataaaccgaaatcgcagagcgcaatgtgaccgttggcatccaacaggatgttctccggtttgagatcccgatatacaatgtcgtggtcgtgcagatgttgcagagccaggatcaactcggctatgtagaacttcgcccgggcctcctggaaccgaccctcacgctgcaagtgccagaacaattcaccgcccgacatgtaatccgtaaccaggtagagatctgttggggtttggaaggagaacttcaatcctacaataaaaggagaggccgtcatcgcggttcggactaagatattgcgctcaccgagcgtgtgtatcacctccttcttctgaatgataaccttctttgagagaaccttcatcgcatagatacgctgtgtgtccttcttcttgacttgatagacctgtccgaaagttcctttaccgatgagtttgaggacgaggaagtcatccggtccgacctgcttccgatcagtcctttcaaacttcatatcgagatgaatttctccagacacttggctgtcgccggcaccgcgcgcgaccaagggaaaccagccttctagtcggctgtgatcctccttgaggttgatgcagaggcgtacgtgacccaagaaagcttcctggttgttacggtcatagactgtgacatcgagttctgattgatctcccataacatcacttgaaagaacgtgttagtgagtgacacaagtgaaggagttggggtggggtaacatacaaggtggcctcgtgatcccagtgcgggtctgtcacgggcgtccgtcccttgtgctcaccctcgacggcactgttgtgagagctggatcgggtcttcaacggaatagccatgggccgaccagcagcctcctcggcatctgactcctgctggcgcagtttcttttcctcctcgccgtcgcgagcacctttggagatgtactcattccattcgaatacacacaccacatatgggtcgaaacttggtcgcagtcctcgaccatcggtgatcttcaaaaataatttaccattgatcgggcccgtgggtgcgccgttggccggggatgttgatgttgcagccgcagccgcaggctcggcctcaggcgcaatttcagactgggactggggtgggaatgcttcatcgagtttcatagtaatctcgtccgtggagctttccatgtcttccgactttgactcagactgtggggtctcttgcgaggtctttttcggggcggaagtggcggtcttttcctgggcggttgggagctcgttggacatggcccggggagtaagaggtggggtattcttaagacgcgacccatcgggtgcgttttcagttagcttggctaggttctcggaagatatcgagacatgcggtttctcatggtcgaggaggggagcttcagtcagggaagaggcatctggagggagggatggattgcaaaaatgggtggcaagaacggggtcgtcagagatactggatactgggagggaggtttgacggcgggaaggagggtcttctggaggagtttgtgtgggtgaaatgaggtaattcttcagcgttgtaaagatagaagacattgctggactcgtcccgaggtccatctcatccgaatcatgctgtaacaaggagtgtggaggggtgtgcagactggggtgttcctcatccatcttatcagacccatcttcccgctccatcatgacaaaagactcggatgaatcggaggagtgttgcgtgtgcgcatttgattgaagggtctcagagggtttcgacagacatgaccataaccgcggaagactcgctttatcaccggagaaagaaccaacctggaagtagttgtgcataatggaaggcagacgcttatcggccggatcgggctcgggtgttgcgattcctgtcggcgtgggggtggaatcaggcgacccaatctgatcttgggtatcgtcttctagtccggagctatgagattaaaaggtcagtcatgagaaatgccagctccgatataatctgcaattccacaggctgtaggcaaattccgacaaggtccgagacgaaaggcgaagcaccaagactttaagagaaagccagcatcctcgaaacgccatgtttcatgcaggtcaaccctaacaagaacagactgtaatgcaatgcggtgtgaggggatcgtggaccctctttttccctccttcaaccccgcctttcaaagggaatgccttgagtcaaataagagatataggaagttgactcacttcattgtcttcatgtcgtcgccgtgcaacacgggtccactctgcgcagccattgtgtttccattcaagaacgtcgaaaaatgaagaggaacaagaagtgggggtaaaattgggaagttggaaagaaaaaaaagagatgcggattttttgatgagctaagggagtttgcgggatgaatttgaacccgttcggattttccccaacaagaaaatgaaatcgggtttatttccagttttattcgatttgggaggtttggaaaagaaaggaaaaaaagatgttgatttggtagtttttggatttagaagtggaattctctgcggtaatatagaaccccactgaaagatccttaaagggttctcactgatagtccatgtttccgagtgtattatcaaggcacgtgtaagaccataagaatataagatataatcttatgggataacccagctgaatgaagctgatgctgactataaggcaaaggtttcgaaaaggactagaactaaaaaaaaaccctgcaaggacattgacgccttcttgtattctcgaataatcccgagccatccacgccttgtttcccgattcgtactatatctcaagagggaaaatgaatgagaaatgaatcagagctgatattattattagaaatcagaaatcagaaatcagaatggaatattattaggaaaactaacgtcatgtggaggcccaatttgctcaatagccctagatatcaagacctcttcgtctagtctttcccttctgattccgctttctagaatgtgaaggaaacaagattatcgcactttcaggtcacggtccctagtccgagtgacattaggctcccaagaacatgtggctacacccttttcacaagatgttgagtcttatcgcgcttcgaatctccactcacagcggggtatctcgttcattcttgcatctgatgacaacatcggagtatacgaagtagcgacagaccgctttttatattcggatggtttccgtgttctagtactagtacctatatatatgactcaaagccggtacgcttagtctatacactaccctgcttaagataaatctcttgcgattcttttgcataaaataatgaactacaattaactctgaaacccaaagatcgagaccgtgacaatctttcagctttcaatatggcccgggtctagctctcagctcctcttgcatctacatacataccaggtgaattgtgagatatgctgtggtcggcagtgggaccttatgtacggcgcgccccgatgacgcatgtggaggccttagaggatcccagtctttgcgctaacgtgtggttcggtggatttaagacccgggtcgtgcgtgaatgatgtacgtgccacataagtgagcttactgtgactgtacagtcattgtagatgaaggaaaagagaccctaaagagctatgccgatctacggttttggcccagcttatccaaagtaggatccatgctctcgaataggtggggcgaaagaggcgatcgacgcttacttccgcaacctcccttttatgtagtatgacgaatgacatactacggaaataaagatccaagacgttgattctgggatgatatctgacttcctcataccctggacttgcatgataaaagtgtgttttatttacatttaacatggtcgtacggttcatactcaaatattggacatctcgacaaccttcgtggtaatgcccggagtacagccgagacctgcatgatttcaatgtgcattctccgttatgcacaagatcgagtccgagtttggattgaatttggtcatctgcatcgggagatgatcggcgggcttgtacgccgtgcaacaaagtaagctcctctgggatatatggttttactcgagcttccagctggctgcagaaactatatttaatcagaaccaatatattttccgggggcatccttatattaaccattcggatttcccggttgccgagccgaaaatatatggcttcggtccttctatctgatttcttgcggcgtttttctttgattgctatttaaacctgctagaacgaattcagatgttatctataaacaactggtctaagagatgactcgataccgtgattaaaagcatgttactttcctactgacccgggatatggttcgctcaagcctcttacgggttcgagtcaggagctatctctcacatgtgatattggagattgactgcaaatagaggcatagatgaggtcagtggttacacaagcaattaacctatgcattatgcgtttcgatgcagtcgtctctttgttggatggatgcaataattgacacccaataatgggaatgtgattcgggagagaacggtgcactatcccaccggtgaatacttacgggattctcccaacatgtagatctatagttagatggactcatcttgagcattgaatccccgcactcccataccggccaaggggtaacacaaagcctatgatatcagtttaatatgagcattttgagacggcaatggcggttgggggtctagaattggaaaagaacggatatcgaaaaacagcaggatgttcgcccgatcaacgaccagcccgaaatgctccgttggagtaggaaaaagcatatgacgtcatggaagatgatacgcggtttgccttgtttgcaatatctatatgcacctctttcctgtttcggccgccgccgcttttatgagtagatatcagcactggctcaaactcctttttttcaaggttcctcttcattccagggacgggagttgggtagtcatggtatttttttcagttattgtgattgtgatggttactgtggtcttgagaatggtaaaaagtaatctgcccattttgtataaacttgggggtaatggatggtatacaagtttccgcaagacaagaagtcaaataggcaaagaaactgcggacatgaggtaaagctataaaccaattcagcaaatgaataatagatatatgctggcgttcgccgtattgatcaacttgaacgtgcacaggatgacacaaatgtgcccacaacgagatcgctgtacggaacctatcgtcttcttggctcaccattttctgcatcagttcgccgccttcttcatgatggcccacatgattttcaaagggggaaacgaacatttcgtggatgtcactggcagtaaccaaaggctttttgatgacattgcccatactgccaagcgggagagaaaatgctgtattaggaatagtcgtagggctaggccaggtcttcttgatgataattcccctaattccaatggggaaagcaatagagctgtgaatcatctttgtggtgacccgagccttttgagtgttgcccacgatctcaagtgaggcagaagagcaagtgggaaatcggcttggtggtgatagctccttggatgatgttgactcgatcttgagcttggaaggtgttggcatctttcggttcgaattggataaagaactccagcgaccggggaaaacacgtaaccggggtcaatcgggcgtccaactagtgatggtatgttgggtagagggggatcgcatcggtgctgtgattataggggaaattgaaaatgcctgctgcttcccatacgtcaacctacaaaaacttattagcctaatttcatagattgaaggggaatcgcaccacctgggagccctctcgcgcaacggcctggcatatttggcgttgcaaagtattgcatgcccaacacttctccccagcaagccgcttgaactaggagcaggtaccgtattgccaaatcatactgtagtggagggaacccgttctcaacaacggtcaggtgatacaagtcttagattttaggtaccgctgttttgtagttaactagtagttaactagttagttatgtaacattcagaatagcactgataacctagaatctagttatacattcctctcatctcacgaattcgtatattacgttcgcccctttgaccattgcatgtgttgtttcaatccgcatacaccatatacattgcgagcaaaagcggcggaggtgagcactagaacggaaggggagtgctaagcattgccagatgtttgccgcgtttgcagcttgtaatgtacccggaaaaacttcggcccttcgcaaaacagctattcctccccatctgcgcttccccagcatatcgaccaaccatcgacaaaatgccacgaaagctaagggcggctgcccaggcggctgcacagtcgataagtgagttgatctgaatctcacgttggcccacacctgccacaaacatccgtcccttcgactatgctttgaatttcatcctctccttaagacgcgtttgcgactaaccacattcagaaaatgtaccttcaattccagatgggtccgatgaggagatggccgacgcgatttcctctcagccctcctcgcccgtagtcgaaccagaagactcccccgaagatcccgatgtcgaacccgaggctgaaccagaacctaaacgtgaaccagaacctgaacctgaagccgaaagcgcagaggttcaggcttccgaaactcctgccacacccaagcctgccacacccaagccagaggaagaactgaatgctgcgactcccgcagaagactcaattcttgccgacactgacaacacaccttcctacggacctggccgcccatcacttccgcctcgcggcaagcgtcgcattggtcgcccacccaagaaccctcggcctgaatgggatccggctaacggagatccaccattgcgagttactactccagtcaagagacgccgtggtcggcctgctgctagcgggggacgctgggcacgcaaccgcggcccctctcacctcacccaggtgcctgtcgacaaggaaggaaacatgatggacgtaatcaacgacgaagtatcgattccacctgacccaattggcgctactaaagtcgatgagaatggccacctacaaggcggacgcgagtatcgagtccgtacctttaagatccttggccgcggagaccgactctacatgttgtcgactgaaccggcccgctgcattggcttccgtgactcgtacttgttcttccagaagcacaaaatgctgtacaagattattattgatgatgacgccaaacgtgatttgattgaacgcgatctcatccctcactcttacaagggacgagccattggtgttgtcaccgcgcgctcagtgtttcgcgagttcggcgcaaaaattatcgttggtggtaagaagatcaccgacgactacgacgaagctgctgctcgcgagcgcggtgatgtggagggcgagttggtcgttccggaagaccggctgcccggacctggagaaacttacaacagaaatcagtacgttgcctggcacggcgcaagcagtgtttatcacacaaatgcgcccgcggtcccgcttgttggtggaaagccagttgataccaagaaacgccgtgtgccagtgactgatgataactggatgctcgagcatgcccgggctgcaaggtgagttgatgtttgataccgagccacacgttgggccgtggactaatacatagtatagtaactttaactccaagctcgccgaaatgcgccgtgccaatctgggtggtgtgtacgatgtgcacaccaatattatgcagcatccgaaaatcatgcagccaacccacgcccgctgggagcgcgtttccccggctccgacttctgtcccgaccgaattgacgacgaacatgaactcattgaacatctcaaacgaagcttcttcttccggccacgaaaagcagacgccccacgaaacccaggaatcgcgcgaggccaccacgggcgaaacttctaccgaaagccctgccactaccttttcccccgttcccacccatctccatgaccactacgtcatccaggatatcgtctacgaatccccgccatactcaaacatgggcatcccgggccctgatggtgatgtgcaagatattggccccaacggcctagtcagcgtcgccaaccccaagcatcccgaattcatgagtccagagatcctccagttgcttccgtcggagtgcaaggaagcgctcattgatgctgcaacacaggaggttgaatggaagaccaagtggaccaccgagaccatgaacggcgagcgtactcagccaaccaagagctacgcctggtacccgtaaaccctgtgcttgatttttcttttttcttggggttcttgcgagtcggcgaaatttatgggttatcatgggctggatggatggttggacatggcaggcgaaagccgctggagttattttctttctttctgcttccgagtctgctttcgctttctcaagatatgcctaggatagatatttgaccatgatgtattgactggtttttattccttttcggtcttcgaatgcatgtcgggtctacatgactgaacttggcttcgaatgatagccttctagataataacgaaccacatttttttttctacgatgacatgatgctggcctgctagcctttctgggaccttcgtcataaatacgttctctctctggtagcccttcgtccgtatcttctgactgtatgtagtagtacatggactaatgatttacaactaaatttatgatgcatatccaaagctgagagtttaaaattaataacttagcttacaagaataaataaaacaaagaaaaccgaggtcatctaaaactccaattgaaaaaaaaagcaaaataaacatgaacccaagagatcgagggagtcggcttgagaaagggtgttgaggagtggaacagccagataaaaaaaaatgacagaagacaagacaagacagatcggcacagacctcggggatacctaggtagtgtcggatcatatgtaaggagggaatggtagagaaacaagagagatagaggtaataaagaagagttaccggtacgtcagcaccgggagccacaggtggaaaaaggctgatagaacggctgggtcatgcatgcgagagcaaaggaacaaggaagagcaaagacgaggctgcattggtcgcgtggtaggaagtaagggaccgtcacatggccatttccgcgcgcaactttgccagctcggcctcttcgtcttcttcctcttgtgccttggcggggtgcttgactatagacaagtcgtcagtgagcgagcgatacatgtgataccggtgtatatggttccgttccaacttacgatctgtattccccgcagctggtagccggtccagttgactgcccacaggtacggtcccggtgtgaagcattttcgcgtccatcgcttcctgctccagaccctccaactcggcatcgagctcttcctcgtccgcctgctcgccgatagagaaactggtaatgacgcttccgatctcggcgctgagggcatgctgctcttggaggccctccctgcgagttattagtaagatggtaatacaagaatcgcgacagggcgatatgatagataagggtaaaggtattcagtgagcccgccatcaacgtacatcgtagtgtcgacatcctcgagcttcattccaccatgaatctgcttcatagcggcacctgcctgcttcatagcagccaaggtctcgtggttgatattcgcggcttcgatggagtatatctgctgctcgagttgcatactctgagctgttgtctgctcgagagtcttctcgtggatctttttccgtcggagggcatttttagcggctattgaacacaaagtaaaaagagcaatagttagccaaaactgcaaccttcaaatagatgcctagcgacaatctgcaagatccgcagtcataccattcttatctgtgttgacgttcttccgcgctatagcctcctgttctgagatctggctctcgagatgcctctcacgtttctgcagcatatcgagctgcctgcgcaaatttagaatagcctccttgggcatatctttccgcttctgggcggcggccccgccaaaccaagaccacatggtgatgtcggtgactgtgtaactgggaaaccgaatggaaaaagtaagcaggatagaatccggtggtcaggtaatagctaggtaatatgtccaaggagaccagtggccgaaaatctggagtgagtggggagagaagagtagattggttgttttctttgctgcgagtcaggtggagcgataggctctaggcagagccagggagccgacagacgaagtaagaaaagggcgtaaaatgacctccgaatgagcagggaatctgaagcacacgactcgtcgagagcgcttccaaggataatctctggatgaatgcaaagtgtggaggggaaggagcccgactttcccctcgctgaggctagttatgacatacacggtaaggttagtcacgtgcgccaacaagaaccgctctatagcgcggaagaagaacgtcatgtttgtggccttttgatctgtctcttattcttttctttcaatattcacacttttataatgttgagcatcttcttcaactagcgcagagatgaatgggccgcgcccctcgactcgcgtgttcctctccgatctctcgtctctacaggcggactcgaaggtccgctttcttggctggtgcgtcaggcccagagcgaagaagaaattgtataaagttgaggctttccaatactaacgatgatctacgttcttgtgtacacatagtgtgttatattataacatcaaaactggccatttgatactggaacacaactatccacgcagcaagatagctccaagctctgtatctgtcgacatcaatcctctcctcgaggacctgaccgccgaggaattgggcgtggggacatggctgaatatcgtgggctatgtcagagagtcggagccgctgccgccaccatcttcattctcctcggacgcgaaccagccgagccagaggccttctacgtgcccacctcgtcccgtgtatgtcgaggcaatcatggtatttccggccggagctattgccatcggggagtatgagcgaatcctttgcaattctcagcatgttgagcggatgatacagttcaacaactaagaaaacgaaaacatccgtagtggctgaaaagatgacatggaactaaagccaatcacgcattaatggagcgtctctgcattagatattttgctatgtaatcacttttcgagcacctcatatacaaggcgaggggtatcaagacgtaaatcaaaacaccaggccaaaaggcctcagaaggcaacctaaaccgcctcttccactttcttctcatctgaaagatgcacctgctgaagctgaacctgcctcctagcccgcttcccctccagcttcatcttctcctcctgcatgcgcagaataaggggactcttcatacgaatcttatgcccatacttatagaacacaaacggaatcggcacgatcacgacctccaacaaccccaacagagtgcccgcccaattcggccccagactggcgtacatagaagatccagcaagaggcagaacaccaccgaggatactccgaataaccgagttacccgctaaagcagaagcagcatacatgccgtaactgtgagtcaggtagttggacgaatagatgaaaacaccggtgtttccagcgccgaacggaatacccgcgagcaggggcacaatccagggtatggaggctggggagcaggtccatgcaaaccagagctcgccgactgggatcaacgctgcgcagatgcagacgaacgagaccattgcctcggggtgtaattttccggtctcggggtctttggcgtggctattgattagtcgccggattaagggttcgcaggcgattgtgaggacgacgccgatcccgatgcctaggaaggcgagcccagaaatgcccagttcccacccgcgaatgtctcggaagacgattgggtaggctacgaagcagaggtacaggatgccgtagatgattgcgatgtagatgttccagaagatgctgagcgtgttagaacatgcgatgtgggttgctgctgggtatgtaagtgtaagaaactcaccagattggttcggtgactgccattacaaatggccggctgaggttcagtttgaggatttcagcaaggctcgccttttggtcgtatcgactccaccagcgggaatcgccgctctccttgcgcattctggctgctttcttttggagaatggttggtgcatatgtttccttgaggatgatagcaaagaccaaagcaatagcggagagcatgagcgcgatccagcacatccagcgccagccaagatattcagtgacgaagcctccgataacaggaccaatgactacatcctgttagagatggactcgttatatcagaaaagagaataagggaagaacaaacctggtccgttgagtggcccaatactccaaacagagattgccagagcacggtgctcatcatccaccaaatcagccaccataccgggcgcggtagagatcatgacactgccgaagaaagcagcgatgaagcgaatgacgatcaatgccgtgacggacttggcgagtgcgcaggggatgatcaggactgtgaacacggcaagacaaattacacagacaggtttccgtccgtagacttcgctcaacggggccatgaacatggacccgatggcaagaccgaacagatagaaggtcaagccaagggtgacgataatcctggattggccgaattcctccgccattaatgtgatacctgatgtataagaagttgaatataacacgcttccgagtttgttagctaaggaatctcgcgcttccgaacttcaagatagaaacttacacgatgagagtattccatgatagaaacacgatgcccatggacttatacttgaagttccaattcttggggttctcagggtcatcattgccatcccagtcgacttcatagtcggggtcagcggtggcattggttgcgattgtcgttacacgctccgacagtgacatatgcgaggtccgcgaggcacgagctgtcaatgtctttcctagcgcatcgcgctcgatctgtgcgtctatcgtggaaattgactcgatagagtctgtgtcttgggacatcctctcagtgtgttcgggccatttatcttggccctccaaattgaagtcctttgttgccattccctggacgaagggctttcaaaccaatgaaacagtaccgggagcttgggtgtgtaccggagatcaaatggcaagttactccaatattaagggtcgcagttgatagaataggagaaataagagcaaagaatccctctattttcgatttcagccccgaaataaggttgtagaagtagagtgtgtcgctctctccttttttttatatagagatgtggtggaaaagctgcaaatcctgaaaccgaggttgctttatcaacagcaagcctccaaactgacacagattgtgacagaagatagccctggagaaattgaaggcatttatcatcaaaacacttggaaggtggggctgaaagtcattgataagcatattcaaagagaatttgctaggctcgtagggcgtacatggcttgcaggatttgcgatatgccgagaagatgatctatagcccagaaaaaaaaggggaggatacttacttttcctagtaccaaattgtatataactatagggtaacagagcatcagatttcccttatatccctataccccctatactactccgtgcctggactatgtcctacaagcccttggcatggatttccccatgggcaaagcgatttgccatggcgtgatatctccgcaaagacagaacttgtgtgttccgacccaatttgtctccacacggcctattaggctcgaaagagtgcaccatgtgggttctagcctgggctgtagcgtgccggtttgccgaatactgcctgtgagagctgtgcaatatatactgagggtgtatttctcatggcataataataataatcattccatgtatactacttcgaccttgaagtataaagtagatatcaattttggtccagatcaaagtgggctcgcgtggaaccgggaaaaagcgggttgtgaagagaatgaaacatgaatgaaacaagaatagaaacttctatttcgatcccaactggttatagtcacttttatgtatgtacctatacgtaccggatattccctggcgggtggggctttcctatttgagctgccgccgcttttatgagggtgctcaggctcaggctcactgagtagatgtcagaacgggctcagatcagtgatcatgctcagatcagtcacgtgcaggatgactgatgctcagtgagtgctcagtgagtgctcattggatgctctctgattactcagtgatgctcagtgtccaatcagtgagcaacactgatgcacatggggatttcctatttgagctgccgccgcttttgtgagggtgcttaggctcaggctcactgagtagatatcagcacgggctcagatcagtgatcatgctcagatcagtcacgtgcaggatgactgatgctcagtgagtgctcagtgagtgctcattggatgctctctgattactcagtgatgctcagtgtccaatcagtgagcaacactgatgcactcagcccacctcagaccttacccagaagggattagcccccacagggtcgtttatactgtgatagttagttcgttgaaagcattgttgctgccctcattttccggagcactacacctcatcaagaaaatacattatgacgaaggggcgcaggaaagagcggagaactccattcgtttcatgatgtcttccttctgtcttctaattcagagcggctcgagctcaaagtcccaaatataaaggcagaccgtgtgccagcattagcatgtaataaccaacacgccttctattcaagcgccttttacttggtacattaatctaatatcgcattattttactttgaatacatctcctacctccaggttgcaccgcacttgattatgggcagaaaagtcttttttgccaagcgcgatggaatcgctaaggagaggcgccgtctacagcgagaaaagaatggttatgctcctggggtccatagagaggaggactcaattcgagagaaagacaaaaggcttcccaagaccaacaaattacatcaagaaactatgaacctctggctcgagtgagttaagccgcatctgaagtggcaatccctttcctattatgaattctgctgatcttcctttagtttcactgcaaacccggagaatgggtttgaatccacctcagactatacccggaagggattagcccccacagggtcgtttatactgtgatagttagttcgttgatagcattgctactgccctcattttccgaagcactgcacctcatcaagaaaatacattatgacgaaggggcgcaggaaagagcggagaactccattcgtttcatgatgtcttccttctgtcttctaattcagagcggctcgagctcaaagtcccaaatataaaggcagaccgtgtgccagcattagcatgtaataaccaacacgccttctattcaagcgccttttacttggtacattaatctaatatcgcattattttactttgaatacatctcctacctccaggttgcaccgcacttgattatgggcagaaaagtcttttttgccaagcgcgatggaatcgctaaggagaggcgccgtctacagcgagaaaagaatggttatgctcctggggtccatagagaggaggactcaattcgagagaaagacaaaaggcttcccaagaccaacaaattacatcaagaaactatgaacctctggctcgagtgagttaagccgcatctgaggtggcaatccctttcctattataaattctgctgaccttcctttagtttcactgcaaacccggagaatgggtttgaatattaccaaacctcccttggttctccggctccaactcatgagatgatcaaggcgtacattcgctggtacgcaagttctactcaagggcgactgaacgatgatgggctacctacggtaagaaccgtgagtgcgcatgccgaacagttctttggtggatttgaacaattcacaaaaattaaaatcatcccagacgatcgaaaggaaataaaaatggttggtttattcgtaacttcctccctgagaccatcataaactaacatcgatgcagtggatcaaaaaaaccttgacggcagatggcgtcgttgtagatcaaaagaaagagaaacttaacttcacaaggcatgattttttgagagtagtctcgtctttgtggcagactgatcaccaaacgttcattccgggactgctcaaagttgtcatcttatttgctctccagctgtatctctttactggagcaagagtcggagctttcataccctctagtgaggacaaacatgaaagaggtcttcgatacgaagtaaggcgtctttactccaccgatattatacaacattaatctctatcctagcatatcaagctggttctgtttccttcatccacagctcgttggacggtgggttggaaggtggatcagaaatggctcaaaaatcgtcgatgtgaaaaatacacagtgtgagttagaaggacctagtgttatatttgtcaaacatacggggacttcattaactagtgcctctagattcggaattggtatccgggacagcaacaggccgcaatttgcgtcaggctaccttcttttctctcttgcattagcgcacggtgctatttatggggtggataccgtggatgatctagcgcagtttgatctttcaaatggcgagattcatttgagatggaaagaagagtacttggataaaccagttctcagacatgccacggctgatgggcctcaggagacacctttgacgaaacaaaagttttgttcttgcctgcgtcagatttttaatgcagcagggtactttggtgaattggcaactatccattgtatacgacgaggccttgggggaaaaattgaaagtaagcccctgaaaccacacaaaacaatcgatagacactcgagagagctcttcatactaagttctttacagagagaaatggctctgcacctgtcagtcaaattatggggcatcggggcccaggcacctttccggagcattatcaagcccactgttcctccatagatgtagtgggagccgctctagatgaggaagaccaatccgatcatatcgagtactttcaaggttatgttcaatattacgaacgtggcttgccaggcgagttgccagcagagatcaaaaggagtattttggaaaaaccagatatggtggaaatgagagcccagatcgaatcattcgcgcagaaccacgacgaggattccctcaagaacatgaatttggaatacaggaaggcgctcgttcggcatcgcctgttcgaactcaagcaatatcaacatcggtgggtacatgagaaaagagaccagaaaattatcaaccgaggaaaagaagagccgactcatttgggaaatgacattcgcacacgcgctcaaatgttgattatgcccgaggttgcgcgaatcgcaacagccatgtcctgcaccaaagagctttcctttgacgaaaaacttcttcttgtccaagatctacagacgcagtgtgcccgtgatttcgatgtggtatacctcccaaatcaaagtccggttcatgggctttgtcctgcaaaggggtgccatatcagcattgcaaggtgagtgcctaggctgaataatgacatggccaatactaactccgctagtctgaggaagtgtgatagaagtgcccacattcacggatgtgttcggcgtgagaaagcttctgaccttcaaatatcagaatcagagatgcggttttgctatgaatgcatggaatggtttttgtcgagtcaatggcggaagcattgcgatgcccatctccagtcatggcaaatccagcactgcgaagtgatcatctatcgccataccgtcattcgcccgggctattgccccttttgcttgtgggacccgaacctgaatctctccgcagaaacccgtttgcgatcctggctgcgaagtgacaacctgagggaacacattgaagggcagcacatggctgaaattcagcgtttcaagaaaaagccgatatgcggatgctctcaaatctttaacaatgagcgtgaccttcgaaatcacctacacgatgcgcatgggctaaagaaaaccatatggcaagatccaaagctacccaacaaaaggaagcgcacttgcaaggtggaaccacaatgctcttcaacagaactaggagaggagcatcccaagaaaatcagatttcattattacacacctccgtgccatgagcgtgagcacgtgctaaaagaatcatttgtccccgtcccgtccttgcttccgtctgtcgaagagaatctggaacaatactcggggccgagtatgtgtgacaaatatagcacgaggagcagaagcgactcagtggaactatgcttcttggaggcaagtcccccacccagctcggggccaacaactccaggtcttgaggccattgatcctcgaggtcttgaacctcctgcattcaacagcgacaatgcacgccaatcttgtgacccagttgtcatccagccaaattcactcattttcctaccagaagtggatgaggccaccaaaaagtccgtcagtggcataaaacagccgcaacctcccgctctaagctttgccagtcagccttctgaatactgtgctgtcactgaagccaatgagaggaaagaactgcaatgtctcacctctttgtcgacctatgaccaagctgttactgcggaatttgagtgggagagtcatccacttacacagggaggaggcggcgagggaaacccgtctgttgatgatcaagcccctcccagtggccctcgcagaaccctcactagatccaaggcacaaactcagtcgccccagcatcattcagatagtttgaacagctgcaagccccggcagaggcttaatgcaaagaacaaacgaaagttgcgtgacctacagagacagaatctgaccctgagacagatcgggcctcatttcgcggatattgatatggcgttactgcgacaggcttggatggaattgaagccttctcagagatgcaccagatctcgggccaattgaaagggcaactgaatcatattttcaatcaatagtatttcacttgtgcttggttattatcagtctgtacaaaatttgctattcagccgcgtagtccaaccctcgccgacctaactagactccttgtcacaccatctgaaagttcctagctgtgcgagaataagggatcagttagaaataaatgactcaaattccggcaggatcgcgggctcgttctttaaagagtaaacgcgatgtacgttaaactcgaggggcaaacaccctacactttcagcgcacaagttcgaagcatgatgagcttcctttttaggtgggcccgcggatagccctttaaatgatagtcgagttcttatttctagtcgtatttgattgggcctatccggaaaataactgcagtgggcaacatgtaacagaccgtgaagactagcaatgcaagcaacttggtggctgttctggcgaaagcccaatacagccagcttgttacatggaaacagacagttacattacagttacataatctgcaccgccacagacgaacaagaaaacttagtaagtaattattgagtgtaatgtaacgtaccatgtatgttttaccttgtattatattacagctgctaagtattcaatttctagttatagttggcctgtggacaaaattgatataaaaaagcgtgggaccgatctacgagttcaacatgattacgtagaaacttgctcgtcccaggtgagtaacatgcgctcctaagaacctattggcatccagaaactctctgagtactcctagagaccagcttcctgccccaggagcgccgcatcgttcccaggaaccaccgagtctcccgggagcctgatacaagctcctagggcccaattctaagttcccgggagctcaggggctcctgggactacccgtgccgttcctgggagcattcattcggttcctaggagcttgtatcaggctcccaggagactcggtggttcctgggagggacaatgtcgtctgggaatgactagcgacaaataaagagcagaaaacagacttattgaactctaagccattttcttgtcatgacgttggaacctacaacacagagctaatctagcaagcaccgtagctggcaatccgggcatagggtcagttgaagtcccctttgttcttgcacgaattctagggatacagggtcaagggatttattggtggacaatcacaagctttctatcgtcgcacactgaaattgcaacattgtgttgatacaaaactctgaaacgactttgatttaggtaatagatcgcctccatctgtttacagtctgtttcttgcgggctcaggcaaagtaatgcactgcctgcctttcacataatcccgtttcagaacggtcgccgcaacaaaatgatccttcgcatgccctaatccacaggattgggcattctagccccaatggatgtagtaccttgttcacctggccatcaattatggcgtcattgatattctccggaaacctcttctttcttcctgttcagagcctcgctggtgaggacctcgaaagctggtaaacccgaatacctagagtgcgaatggtgaccgggcaaagtttgtgacttcaacagtaaatctttaactgttccttccttctggttgtttggggtggtgctgtctctcttttgccagttggtactcgagttccctattcttgagctctaggttgcaagctttttgttgagctatcttgatatattcaataaaacactggttctgcttctccaagccggctttgtccactgcgtgggcccgtaacatgttgtcacagttttgtagcataacggttgcctcgtagtatttttgttgcatttttgacatttcagaatatatactcgtaatgattccctcgagcctttgatttggatgttgcatgcctgagacaagttaattcggaactttcatggtacttcaatcccagactgaccttgataaacgattggtaagggggatgggctcgggcggtccgacgccacacgtcttctatgtggaggcatttttgatcggttttggcttttcggacgatttaccacttcttgtaggagaaataagataattgtcagatacagtttttcaaaggccaatggcctctatttaaaatatttttagagggcttatgcattgctgacgttcccgcggtgtaaacgtcggcctcatcggtataagatcgtctactttggatgtcaagccacaagcttctgggatcgtattgcttgctcttgggctgtgagggtctcacgtatacgtgaatgaggacagcgtcttccggatgaataatcaatatcaaggaaatctatagtcgactctagattaaagacgtagcgcgaggaagcttccgcgtggaggggactccatatgcaccatgtgggtccagcagatcatatctcaatttagcttgtatgttatatgtataaccctggaaatacgatgcataactcccaggaataggtgcgtgcttcctgggaacactataacatatcccgggatccttggggctcctaggaaccagccgcagaatcccaggagtaagtatcacgatcctagaagccggtgactcgacatccacttttaaatatatccgtatccatgatatgccctccaaaaatatttaaatagaagtcactgcctcaaagaaatgcgtcttcaaagctcctcagccaactactgggggtgacagacttctctctgaattattactcttagccatccttttattaccatctgtataggtagtcgttacctatacgttcacaaaatctgccaagatgccgcttttgggacttccactagaattacttttgtggattggcacgtccatcgacaagaaggaccttcgaagtctgcgtctcacatctcgagaatccaacgttgtcttcacaaaaagcctctttgattgcatagacttccaagacaccccgccaattcattgggcaatcgagcatagaaacttaggcatcatccagcactctctgggttgggaaaaggcagatatcaaccaaccgttttctggccttacaccgctcatgttggctacaaaattgcggtacgcagacgctgttaatttgctcttaagccatcattcggtgaaagtcatacagcgtaatactttgggagaaagtgccttctcgatcgctgttctgcatggaagcgtgaaaattgtcgaacgactcctcaatgtgcagaacattgatctcaataaccaatccctggacggaaatgcgcccatttcaattgcgctgacctgtcaccaaacctacatcttccaacttctcttgtctgatgagcggacaaatgtcaacatctgcgaccatcatggccaaacaccactgcacctagcgacagaaattggcgattatggagcaatccaaatgcttgtacgaaatccgcgagttgatgtcaactgtttcaaccaccgacaggaaactccgttgcttctggctgtcaaaggacacggtcgttttctccccatcaacaaaagactactcatcgttgaagccttgcttttaagttcatgcatcaaccttaattatcaagatgagaatggacgtaccgcaatctggtatgcagtgaacaattccgacataaaactggctgagctcctcttgcagcaaacaaatctggacctcaattgcaccgacaagctgggtcagacacctttggcaaaggctgctgcaaatggctccttagacttgatcaaagtcctcttccgtcagccggggcttcataaaagccctcaatctgccgatgcatttccgccgctctggtcagcatgtcgcgcaggacaattttcaatggtggaatttcttttacaaagttcagccgacattaaccaaaaaagtccatcggggacgtcgccacttcaggtcgcaataatcatggagcacgtcgacattgtccatctccttctcagctacggagaatctttgttgatcaatgaccaaggccctagctcctttactgcgctcatgtttgcgtcagctcacggtaggtttgaaattgccgaaatattattggagcatcccaacataaatgtaaatgcggtggacgaccaggggagaacatctttctggtggggtgcggctggtgggcatttagtggttgtgcatttgttggccaatcagcgtggtgtgaaaaagcgactgaaagattcaaatggccagacggcgtatgccatcgccaaggaacgcaagcatgggcatgtcaaggtttatttgcgaggcttctagggttcagctagtttatagaaagagatttcaattgatgtgttcacggcgatcgggttctctgagtgcaatacggtattgtaacagcagtcttttcaccgcggcctgttgtctactgctcatcttctctagtgatcgataccaaggacagatctgacgagcccatctctagtctagagattagcagtgcgacgggcttgtgctaatgctaactaaactggaaggaaggactgatctccatctgacgacatataatattagctagcttacgttgacaggaagtacacaatcaagtgattgaattaatcagacgcacagggttagcgggatacgacggtccgccacctgcttctgcgtcgaggatacgatcgttctctcggcgccatcgaatgtaaaatcatctctacaaccaagcaatacccatatctaaaatttgccaatggacaatgagatctaaacaccatcgaccgatggatgaacggccttgatcgaagccatgagtcagtcaacaacttaactcggttctcattcggggatgcagaagatgttattgtaagctgtcttcttgaagttcattggaaaaaggttaccgaagacttctgttgcaagaacgctctgcctgtatttgatggcctttcgctcacctgcacgtggccaagaatggcgaaattccgcacgaccagagcttcctctttggacgaccagttttgaccacactcattcccagattcctaaagcacaaccgccgcagactcttccccactccgatagcacaaccttaaagtacacgagtcttgattccggttcagcttatgaaccgccatcatctccaccggattctccaaaggcagtggctcaccgagtgcctacaagatctcagaccagctgtgcaccctcggctgtacagcgtcgctcgcagtcgccagactcatcaggctccaattcgaaccaagcaattggccacaaacgggcttcaaccaagttacatcctccccatcttcccaacgagcaggtcatcaacgggacgcgggaaataatcaaggcaaccaggcccggtatcacgatgcgcaattttgcacccaacgatgtttactcggattgcagtctggcagtgtgttagatgactgctgtccaaatgtgatgctccatcatcgaagcaaagacaatccccagcatccgattacctaaaaagatttggtccgtttacttaatgcgcaactggacgaaaacattgaccgatgcacacatcttggcggttgtggggcatactccgtttgaacttgcttgtgttgaatatggctacactgttattggaaaaggaaccacatcggggctgtggaaagaagtctcccgcgaggcgcaggtataccaaattctgcggaaggcccagtctgcaaatatagataaaagccgcaacaaacctgtacacacacacacacacacaattcattaacgcccggcggctgagccgaaagggcaactatcactaatctaccagtacatgcatatttgaacatttgccgtgtctccttggagcccatgcggtatttcctgccgtctttgacattacagtttccaatctcataactggtccctgtgggttagtattgattagtagactggcttgaaggcgcttcttcaagtgttcaacatcctatcctcggcagttgaagcgcgtccaccgttctcacaaggtgttggggttagtaggggtaaagtattctatctgcgttcgtcggcataattaggtggccccgagtcggcccgtagcgatggcaaaccgtattgaggctcgcactgcttccaaattcggcgtccacttttgaccatcggagggcgacttcccacccaagaagaaggacatgttacttcggcgagtgtgggtacattgcagcatttctgtccggtgcgcggtccacttccgacatcgaaagagaaagtggtccacggtctctcttgcttgtccacatgcacattgatctgtctcggcagcattgattcgaaagagatatccattgagtcttgccatgccagtccggagctgggccaacacgctcgcttctttccacgataatcggtcatacagctgtcgcgtgtgtttccctggaagtgcggtatccactcggctggaatgtcttcctatgtcctcaggtagcttcctgctggggattgcttgggcacgcgcaatcttcagagtcgtcgatttcattttggggacctgtacttgcgagatagcattttcttgcgtcgcggctctcgcgtgctctttcgccatccctagtagtttgttgtcttcgctagtggggacccaccggacgctgatctgatttccatgcctctgcaatctgctcatcagcttgtagctttggcagacgaattcctgacccgactgttgtcgcgggttcttcaacgtaagagccgccgctttgttgctcgtgatcagtgtgatcctaaagtctttcaaccccacgagtgtcttcagtgtatgcgccactgccgccagctccgcggaaaatggattttgctctgttctcgcgctcaacgtgacggacaaggtcttcagtctcactttgcgatagcgtggtgcagatataatattgcattggtatactaagatctagtctgttctttaagccaatacaacggagagatgggcaaattcccccccatgctttcccagctccttatccagctcactagtactctcattcctagatgtccgcagatcctcttgccttcaagatcttagcctttggggttccagcagagccaaaaaccttcccccacactcatatacccgtttgctccttaagcccaccctccaggccaagttgcagctctgctaagtccccttagggtcacggcataacaaccttcctgcttcttgtgaaccgacatgcgcatccgtcctctcgggctatactgacagtgttgtaaggatctctagtcggcagccgatggcgacgcgccaaccttcttcctagccatcgttgccatagtatacctcagtccacaagttggcgtgatttcttgcttcctgatacctagtatcctctcgttctctaggccgaccatgtcttgcagatggtccctttatacacccaagcctgcagcgtataatctttccatccactaaccagagtatcctccgattcgaggtaagggagccagcagccgatggcgatacaccttagccctaatcccacaaatccaattctaccccacaggtgtcctgctcgacttcgatccgcgcctctgagaggctctgtgaactccccttggggtgacggcatgagaggctgtaaccgttatcgtcggatggtttttaaatcgttcctatgtgccaaaggggcctcgaggtcgctagaattgcggtggaggcaggccgcaacatcgcggactcgtttcctctggtcgtcattgcgtctctcattggctctggagtaacagagactccaggttcgtagcccacgcctcgtacaggctgagaaatccgatttcgtgggcccaaacctgtacacttccccactcacgtccttatttattctaaaccgactgttcttaaccgactgtgcttgaccgtttgtgcttgaccgtttgtgcttgaccgtttgtgcttgaccgtttgttcttgattgtttgttctttatttttattcaccaacaattgctggctgtttaacaactatctgccgtcaaccgttcaatttttaggtttagttataaaggtgttatttgagaacatctatgtcagaaaatttgcttgaccgcaacctggccgagtcagtggtaaccgcagccccacaaagcaattcgcgataataaagttcgtgttaagcagctgtagcagtgcaacaaacaaacaaacaaacaattcattaacgcccggcggctgaaccgaaagggcaactatcgctgatctactgtacatgtccatctgtacatgctgtgtctcctgaaagcccatacacaaaaccttatcacatatgacattttcaaaaagccgtgtcgcagcgagtttctcgtgagttagtaagtgggtgagtagactggcttgaaggcgcttcttcaagtgttcaacatcctatcttcggcagttgaagcgcgtctaccgtgtgtggcacgaggtggtgggtgagcagggtcggaagaaggggtgggggttatgttcgtcgatatgttcaggtggcctcgaggcggcccgttgcaatggcgaaacgtatggaggcccgtactgcctctaggtttggtgtccagttctgatcgtcagaaggctgttttccccccaaggcgagggatatgtttcctcggtgagcctgggtgcattgtaacagttccgtccggtgtgcagtccacttccgacaacggaagaggaagtgctccacggtctctcttgcttgtccgcaatcgcattgatccgtctctgctacattgatttgattgaggtatccattaagtctagccatgccggtccggagttgggccagtacggtcgcttctttccacgtcaggcgatcatacaacagccgggtgtgtttgcctggcagtgcggcatctactcgtttcgcgtgtcttcctatgttctctggtagctcactgtaggggactgcttgggaccgtgcgatattcaatgtggtcgacttcatccgcgggacgtgttcctgtgggagagcgtcttcttgtgttgcagttctggcttgttctttagccagacttgacagcttgttgtcttcgctggtgcggatccagtggattttgattcggtttccattcctccgcaaccttctaatcaacttgtagatctgacaaactagctcctggccagactgtcgtcgggggtttcttagcgtgagtaccgccgccttgttgcttgtgagcaacgtaattttgtagtctttgattcccactaccatcttcaatgcatgtgccatcgctgctagctccgcagagaacggattttgctctgctcttacacccaatgtgacggagagggtcttcagtttcagttttcgataccgaggtggttgtttctcgatcgccacaccgaatccgaccagctcgttccgagccgagctgctgaccgcgatctgcatatacaggcctgctctggtctggatttcctgtggttggtccatatcaggttgtatgcgttcttcccacggagctaacatagatggattaattgtttccagtgtttccatgtcgatatgcttcagcgcatcggctacccggtacaacggcgagcgatggtatcttctgaacttcctgatccggtctgtacccctgcggagggggttggtttcaggcagggtatgcatgtccgtccacatcttcacggcccgtctccagaatcgttgtcgtgtggtggtacttcccgaaactggtgtcaccacctgcactcttcgtttgattccccaaccctaatgccaagatcctctataccgtattgggaatagacccgaagtatcgatattcctgttagattacctatacgaccctttacgccaagtgatacatactaagctcccaggaactgttagatccccaaattacatgcatttttataacccagcgtgcccggatctccatcaagataactttatctcctaattgagcagagggtatatgtatgccctcgggaggtctcgaggtctggccagatatccaactaaccaggcaagcgtctctttagtttggcttgtttgtaagaagttgctgctcaaataaataatagactaatacgccattgatttttatcattgaaaccgaatataaaatactgccaagaccggggatcatgaactttaataggtatagcgtgttttgaaagtggtgaaattgatttcaatccatcctgtatcaatttcgaatttcactgcacttgttagtgaaacaaacctccccgcttcccctgactgttccttccgatctctgagaacgtgagtgtagaggctataagagtctgccggccggcccctcaaaagtttaatctgagcaaccacgacccctgaattatgactgccacttcaccccttaaccccgcgaccacggcccagtgcctcttcatcaagagtgacgatatgaaaaaagcatttattcatctacccgaggagttactcttcctgattgcaagttttctagagaaagaaaaggacatcagctcgttatctcgaacttgccgaaaatgctatcttcccctcaactccttcctctatcaccacaattcgttgctaggaagttccgctttgctatgggcggcccagcgggggatggaagtaacagctcgtttctgtattcaaaatggagcccatgttgaggttactgatatccacgatcacgacagaacaccactattctgggccgcgtgcaagggctacgaggctgtggtgaaactcctacttgagaccgggcgggtcaatgctgattcaaaggactcccacagcgagacacctctgctcgcagccgctcagaacggccacgaagcggtggtgaagctcttacttgatactgggagcgttgatgttaattcaaaatgcgcctacgagacaccgctgttccgggccgcgtatcatggccacgaggcggtggtgaaactcttacttaaaactggacacgttgatttgcagccaaaggacgacccctttggttggacaccgctgtatgtcgctgcatggcatggctacgaagcggtggtgaagcttttacttgcgaccgagggtgttgacgcagattcaaaggactccaacggctggacaccgttgttgcgggctgcgcaggcgggccacgaggcggtggtggaatgtttacttgagactgaacaagttgttgtgcagccagaggaaggccccggcgattggacaccgctgtccgtcgccacgcagaatggccatgaagcggtggtggagcttttacggtggagcgagtggcgaagcttttggaatcgagcaggtcgataaatcaggaattcgtaaacaatataaacgggcttgaaactcgcattcccataaagattcatgctttaaaggggctagcttggcgccatcttggcgtgatcactggtgattgaatgtgaaaaccaacctctaccaaggaacgaaggcttccgaagtggtgccaattaggtcgacttacagattaatacagcggctaaatatccagattactctatgtaagaaacaatacacggcccactaacaaggatactccggaataactcccaatatagactagtctgtcttggcagttagggtttgagaaacaatcgaagagtgcaagtggtgacaccagtttcgggaagtactgtatcgcagcggtaccctatacactgtaccctatacagtttcgagaagtactgtattccaaggacatactcgagagatagagagaccggaccatggggatgaccacgagaagccagccatctcccacccccgaagccgcaaaccccacaatctcacccgaataccccaacgttgaggacttttctctcgccgaggatgattctcatgatgaggacgattctcacgtcgaggatgattctcacgatgaggattactttctcgtctcaatcacctacgactactccaccatcacagcccgagctcgttcgttccaaggaatagtgcttgctagggccactccgctccaactggcccagaatggcttctattaccgaccttcaggagtcagcaatgtggcatgttgttttgcctgccaatcgaccaagcatttatccaccttccaatgcaccccgttcgaggaagtgcaacaactacacgaggaagactgcatatggcagataatctcgtgcgatttgaaacaccacctcggaactcccaacaaacccccctcctcaaccaccgcattccnnnnnnnnnnnnnnnnnnnnnnnnnnnnnnnnnnnnnnnnnnnnnnnnnnnnnnnnnnnnnnnnnnnnnnnnnnnnnnnnnnnnnnnnnnnnnnnnnnnnnnnnnnnnnnnnnnnnnnnnnnnnnnnnnnnnnnnnnnnnnnnnnnnnnnnnnnnnnnnnnnnnnnnnnnnnnnnnnnnnnnnnnnnnnnnnnnnnnnnnnnnnnnnnnnnnnnnnnnnnnnnnnnnnnnnnnnnnnnnnnnnnnnnnnnnnnnnnnnnnnnnnnnnnnnnnnnnnnnnnnnnnnnnnnnnnnnnnnnnnnnnnnnnnnnnnnnnnnnnnnnnnnnnnnnnnnnnnnnnnnnnnnnnnnnnnnnnnnnnnnnnnnnnnnnnnnnnnnnnnnnnnnnnnnnnnnnnnnnnnnnnnnnnnnnnnnnnnnnnnnnnnnnnnnnnnnnnnnnnnnnnnnnnnnnnnnnnnnnnnnnnnnnnnnnnnnnnnnnnnnnnnnnnnnnnnnnnnnnnnnnnnnnnnnnnnnnnnnnnnnnnnnnnnnnnnnnnnnnnnnnnnnnnnnnnnnnnnnnnnnnnnnnnnnnnnnnnnnnnnnnnnnnnnnnnnnnnnnnnnnnnnnnnnnnnnnnnnnnnnnnnnnnnnnnnnnnnnnnnnnnnnnnnnnnnnnnnnnnnnnnnnnnnnnnnnnnnnnnnnnnnnnnnnnnnnnnnnnnnnnnnnnnnnnnnnnnnnnnnnnnnnnnnnnnnnnnnnnnnnnnnnnnnnnnnnnnnnnnnnnnnnnnnnnnnnnnnnnnnnnnnnnnnnnnnnnnnnnnnnnnnnnnnnnnnnnnnnnnnnnnnnnnnnnnnnnnnnnnnnnnnnnnnnnnnnnnnnnnnnnnnnnnnnnnnnnnnnnnnnnnnnnnnnnnnnnnnnnnnnnnnnnnnnnnnnnnnnnnnnnnnnnnnnnnnnnnnnnnnnnnnnnnnnnnnnnnnnnnnnnnnnnnnnnnnnnnnnnnnnnnnnnnnnnnnnnnnnnnnnnnnnnnnnnnnnnnnnnnnnnnnnnnnnnnnnnnnnnnnnnnnnnnnnnnnnnnnnnnnnnnnnnnnnnnnnnnnnnnnnnnnnnnnnnnnnnnnnnnnnnnnnnnnnnnnnnnnnnnnnnnnnnnnnnnnnnnnnnnnnnnnnnnnnnnnnnnnnnnnnnnnnnnnnnnnnnnnnnnnnnnnnnnnnnnnnnnnnnnnnnnnnnnnnnnnnnnnnnnnnnnnnnnnnnnnnnnnnnnnnnnnnnnnnnnnnnnnnnnnnnnnnnnnnnnnnnnnnnnnnnnnnnnnnnnnnnnnnnnnnnnnnnnnnnnnnnnnnnnnnnnnnnnnnnnnnnnnnnnnnnnnnnnnnnnnnnnnnnnnnnnnnnnnnnnnnnnnnnnnnnnnnnnnnnnnnnnnnnnnnnnnnnnnnnnnnnnnnnnnnnnnnnnnnnnnnnnnnnnnnnnnnnnnnnnnnnnnnnnnnnnnnnnnnnnnnnnnnnnnnnnnnnnnnnnnnnnnnnnnnnnnnnnnnnnnnnnnnnnnnnnnnnnnnnnnnnnnnnnnnnnnnnnnnnnnnnnnnnnnnnnnnnnnnnnnnnnnnnnnnnnnnnnnnnnnnnnnnnnnnnnnnnnnnnnnnnnnnnnnnnnnnnnnnnnnnnnnnnnnnnnnnnnnnnnnnnnnnnnnnnnnnnnnnnnnnnnnnnnnnnnnnnnnnnnnnnnnnnnnnnnnnnnnnnnnnnnnnnnnnnnnnnnnnnnnnnnnnnnnnnnnnnnnnnnnnnnnnnnnnnnnnnnnnnnnnnnnnnnnnnnnnnnnnnnnnnnnnnnnnnnnnnnnnnnnnnnnnnnnnnnnnnnnnnnnnnnnnnnnnnnnnnnnnnnnnnnnnnnnnnnnnnnnnnnnnnnnnnnnnnnnnnnnnnnnnnnnnnnnnnnnnnnnnnnnnnnnnnnnnnnnnnnnnnnnnnnnnnnnnnnnnnnnnnnnnnnnnnnnnnnnnnnnnnnnnnnnnnnnnnnnnnnnnnnnnnnnnnnnnnnnnnnnnnnnnnnnnnnnnnnnnnnnnnnnnnnnnnnnnnnnnnnnnnnnnnnnnnnnnnnnnnnnnnnnnnnnnnnnnnnnnnnnnnnnnnnnnnnnnnnnnnnnnnnnnnnnnnnnnnnnnnnnnnnnnnnnnnnnnnnnnnnnnnnnnnnnnnnnnnnnnnnnnnnnnnnnnnnnnnnnnnnnnnnnnnnnnnnnnnnnnnnnnnnnnnnnnnnnnnnnnnnnnnnnnnnnnnnnnnnnnnnnnnnnnnnnnnnnnnnnnnnnnnnnnnnnnnnnnnnnnnnnnnnnnnnnnnnnnnnnnnnnnnnnnnnnnnnnnnnnnnnnnnnnnnnnnnnnnnnnnnnnnnnnnnnnnnnnnnnnnnnnnnnnnnnnnnnnnnnnnnnnnnnnnnnnnnnnnnnnnnnnnnnnnnnnnnnnntggtggtgaaactcttacttaaaactggacacgttgatttgcagccaaaggacgacccctttggttggacaccgctgtatgtcgctgcatggcatggctacgaagcggtggtgaagcttttacttgcgaccgagggtgttgacgcagattcaaaggactccaacggctggacaccgttgttgcgggctgcgcaggcgggccacgaggcggtggtggaatgtttacttgagactgaacaagttgttgtgcagccagaggaaggccccggcgattggacaccgctgtccgtcgccacgcagaatggccatgaagcggtggtggagcttttacggtggagcgagtggcgaagcttttggaatcgagcaggtcgataaatcaggaattcgtaaacaatataaacgggcttgaaactcgcattcccataaagattcatgctttaaaggggctagcttggcgccatcttggcgtgatcactggtgattgaatgtgaaaaccaacctctaccaaggaacgaaggcttccgaagtggtgccaattaggtcgacttacagattaatacagcggctaaatatccagattactctatgtaagaaacaatacacggcccactaacaaggatactccggaataactcccaatatagactagtctgtcttggcagttagggtttgagaaacaatcgaagagtgcaagtggtgacaccagtttcgggaagtactgtatcgcagcggtaccctatacactgtaccctatacagtttcgagaagtactgtattccaaggacatactcgagagatagagagaccggaccatggggatgaccacgagaagccagccatctcccacccccgaagccgcaaaccccacaatctcacccgaataccccaacgttgaggacttttctctcgccgaggatgattctcatgatgaggacgattctcacgtcgaggatgattctcacgatgaggattactttctcgtctcaatcacctacgactactccaccatcacagcccgagctcgttcgttccaaggaatagtgcttgctggggccactccgctccaactggcccagaatggcttctattaccgaccttcaggagtcagcaatgtggcatgctgttttgcctgccaatcgaccaagcacttatccaccctccaatgcaccccgttcgaggaagtgcaacagctacacgaggaagactgcatatggcagataatctcgtgcgatttgaaacaccacctcggaacccccaacaaaccgccctcctcaaccaccgcattcccctcccctaaaccgtcaactcctaccgccgattccagtacacaaactacagacgactccagtataaagtctcaaactcaatccacgccgatcacatttacttcagcgaaggaacggttgaacactaacctggactgccgttccaatccgctacccaccataattgacccagagcctcaacaacctccaacagcccactctccccagcttcatcaaacgataccgtccatcacttcctcgccccaaaaccaacaaacaacgtatgcttccgtcctccagcgacctgtcacatccataccgcgaccgactcctccagtgcaagaaccttttcttcccgccaaccccacactcacaattgaagatcttcatctccgttttcacaataaaccgtcaccgttccaggtcgagaataagacaagccaacgctcaaccaaacgaactcggaacaaaaccgtatctgtcacacaatcactgtccagattcttagcctctgctttgcccgcattctcgcggttcttaacagagatgcagccaaaatcggacgcttgctgtccgtctcattcgtatatttctcacagccgcgccatgagagcagcctaataccgcaaacggcagcaaggccacgacaggccttaccaggtgaggctcaaagttcaccgttcaggcagtttggatcaatcccagggatcaaccaagatgtatttagaaagttgctgtagcctgtatatcgttcgcgagaggtcagggtaaatgaattctactactgtatcgcagcgagtttctcgtgggttagtacgtgggttagtaggctggcttgaaggtgcttctccaagtgttcaacatcctatcttcggcagttgaagcgcgtctaccatgtgtagcacgaggtggtgggtaagtagggtcggaagaaggggtaggggttatgttggtcgatatgttcaagtggcctcgagtcggcccgtcgcaatggcgaaacgtatggaggcctgtactgcctctaggtttagcgtccgcttctgatcatcagaaggctgttttccgcccaggaagaaagatatgtttcctcggtgagtctgcgtgcattgtaacatttccgtccggtacgtcatccacttccgacatcggaaaaggaagtgnnnnnnnnnnnnnnnnnnnnnnnnnnnnnnnnnnnnnnnnnnnnnnnnnnnnnnnnnnnnnnnnnnnnnnnnnnnnnnnnnnnnnnnnnnnnnnnnnnnnnnnnnnnnnnnnnnnnnnnnnnnnnnnnnnnnnnnnnnnnnnnnnnnnnnnnnnnnnnnnnnnnnnnnnnnnnnnnnnnnnnnnnnnnnnnnnnnnnnnnnnnnnnnnnnnnnnnnnnnnnnnnnnnnnnnnnnnnnnnnnnnnnnnnnnnnnnnnnnnnnnnnnnnnnnnnnnnnnnnnnnnnnnnnnnnnnnnnnnnnnnnnnnnnnnnnnnnnnnnnnnnnnnnnnnnnnnnnnnnnnnnnnnnnnnnnnnnnnnnnnnnnnnnnnnnnnnnnnnnnnnnnnnnnnnnnnnnnnnnnnnnnnnnnnnnnnnnnnnnnnnnnnnnnnnnnnnnnnnnnnnnnnnnnnnnnnnnnnnnnnnnnnnnnnnnnnnnnnnnnnnnnnnnnnnnnnnnnnnnnnnnnnnnnnnnnnnnnnnnnnnnnnnnnnnnnnnnnnnnnnnnnnnnnnnnnnnnnnnnnnnnnnnnnnnnnnnnnnnnnnnnnnnnnnnnnnnnnnnnnnnnnnnnnnnnnnnnnnnnnnnnnnnnnnnnnnnnnnnnnnnnnnnnnnnnnnnnnnnnnnnnnnnnnnnnnnnnnnnnnnnnnnnnnnnnnnnnnnnnnnnnnnnnnnnnnnnnnnnnnnnnnnnnnnnnnnnnnnnnnnnnnnnnnnnnnnnnnnnnnnnnnnnnnnnnnnnnnnnnnnnnnnnnnnnnnnnnnnnnnnnnnnnnnnnnnnnnnnnnnnnnnnnnnnnnnnnnnnnnnnnnnnnnnnnnnnnnnnnnnnnnnnnnnnnnnnnnnnnnnnnnnnnnnnnnnnnnnnnnnnnnnnnnnnnnnnnnnnnnnnnnnnnnnnnnnnnnnnnnnnnnnnnnnnnnnnnnnnnnnnnnnnnnnnnnnnnnnnnnnnnnnnnnnnnnnnnnnnnnnnnnnnnnnnnnnnnnnnnnnnnnnnnnnnnnnnnnnnnnnnnnnnnnnnnnnnnnnnnnnnnnnnnnnnnnnnnnnnnnnnnnnnnnnnnnnnnnnnnnnnnnnnnnnnnnnnnnnnnnnnnnnnnnnnnnnnnnnnnnnnnnnnnnnnnnnnnnnnnnnnnnnnnnnnnnnnnnnnnnnnnnnnnnnnnnnnnnnnnnnnnnnnnnnnnnnnnnnnnnnnnnnnnnnnnnnnnnnnnnnnnnnnnnnnnnnnnnnnnnnnnnnnnnnnnnnnnnnnnnnnnnnnnnnnnnnnnnnnnnnnnnnnnnnnnnnnnnnnnnnnnnnnnnnnnnnnnnnnnnnnnnnnnnnnnnnnnnnnnnnnnnnnnnnnnnnnnnnnnnnnnnnnnnnnnnnnnnnnnnnnnnnnnnnnnnnnnnnnnnnnnnnnnnnnnnnnnnnnnnnnnnnnnnnnnnnnnnnnnnnnnnnnnnnnnnnnnnnnnnnnnnnnnnnnnnnnnnnnnnnnnnnnnnnnnnnnnnnnnnnnnnnnnnnnnnnnnnnnnnnnnnnnnnnnnnnnnnnnnnnnnnnnnnnnnnnnnnnnnnnnnnnnnnnnnnnnnnnnnnnnnnnnnnnnnnnnnnnnnnnnnnnnnnnnnnnnnnnnnnnnnnnnnnnnnnnnnnnnnnnnnnnnnnnnnnnnnnnnnnnnnnnnnnnnnnnnnnnnnnnnnnnnnnnnnnnnnnnnnnnnnnnnnnnnnnnnnnnnnnnnnnnnnnnnnnnnnnnnnnnnnnnnnnnnnnnnnnnnnnnnnnnnnnnnnnnnnnnnnnnnnnnnnnnnnnnnnnnnnnnnnnnnnnnnnnnnnnnnnnnnnnnnnnnnnnnnnnnnnnnnnnnnnnnnnnnnnnnnnnnnnnnnnnnnnnnnnnnnnnnnnnnnnnnnnnnnnnnnnnnnnnnnnnnnnnnnnnnnnnnnnnnnnnnnnnnnnnnnnnnnnnnnnnnnnnnnnnnnnnnnnnnnnnnnnnnnnnnnnnnnnnnnnnnnnnnnnnnnnnnnnnnnnnnnnnnnnnnnnnnnnnnnnnnnnnnnnnnnnnnnnnnnnnnnnnnnnnnnnnnnnnnnnnnnnnnnnnnnnnnnnnnnnnnnnnnnnnnnnnnnnnnnnnnnnnnnnnnnnnnnnnnnnnnnnnnnnnnnnnnnnnnnnnnnnnnnnnnnnnnnnnnnnnnnnnnnnnnnnnnnnnnnnnnnnnnnnnnnnnnnnnnnnnnnnnnnnnnnnnnnnnnnnnnnnnnnnnnnnnnnnnnnnnnnnnnnnnnnnnnnnnnnnnnnnnnnnnnnnnnnnnnnnnnnnnnnnnnnnnnnnnnnnnnnnnnnnnnnnnnnnnnnnnnnnnnnnnnnnnnnnnnnnnnnnnnnnnnnnnnnnnnnnnnnnnnnnnnnnnnnnnnnnnnnnnnnnnnnnnnnnnnnnnnnnnnnnnnnnnnnnnnnnnnnnnnnnnnnnnnnnnnnnnnnnnnnnnnnnnnnnnnnnnnnnnnnnnnnnnnnnnnnnnnnnnnnnnnnnnnnnnnnnnnnnnnnnnnnnnnnnnnnnnnnnnnnnnnnnnnnnnnnnnnnnnnnnnnnnnnnnnnnnnnnnnnnnnnnnnnnnnnnnnnnnnnnnnnnnnnnnnnnnnnnnnnnnnnnnnnnnnnnnnnnnnnnnnnnnnnnnnnnnnnnnnnnnnnnnnnnnnnnnnnnnnnnnnnnnnnnnnnnnnnnnnnnnnnnnnnnnnnnnnnnnnnnnnnnnnnnnnnnnnnnnnnnnnnnnnnnnnnnnnnnnnnnnnnnnnnnnnnnnnnnnnnnnnnnnnnnnnnnnnnnnnnnnnnnnnnnnnnnnnnnnnnnnnnnnnnnnnnnnnnnnnnnnnnnnnnnnnnnnnnnnnnnnnnnnnnnnnnnnnnnnnnnnnnnnnnnnnnnnnnnnnnnnnnnnnnnnnnnnnnnnnnnnnnnnnnnnnnnnnnnnnnnnnnnnnnnnnnnnnnnnnnnnnnnnnnnnnnnnnnnnnnnnnnnnnnnnnnnnnnnnnnnnnnnnnnnnnnnnnnnnnnnnnnnnnnnnnnnnnnnnnnnnnnnnnnnnnnnnnnnnnnnnnnnnnnnnnnnnnnnnnnnnnnnnnnnnnnnnnnnnnnnnnnnnnnnnnnnnnnnnnnnnnnnnnnnnnnnnnnnnnnnnnnnnnnnnnnnnnnnnnnnnnnnnnnnnnnnnnnnnnnnnnnnnnnnnnnnnnnnnnnnnnnnnnnnnnnnnnnnnnnnnnnnnnnnnnnnnnnnnnnnnnnnnnnnnnnnnnnnnnnnnnnnnnnnnnnnnnnnnnnnnnnnnnnnnnnnnnnnnnnnnnnnnnnnnnnnnnnnnnnnnnnnnnnnnnnnnnnnnnnnnnnnnnnnnnnnnnnnnnnnnnnnnnnnnnnnnnnnnnnnnnnnnnnnnnnnnnnnnnnnnnnnnnnnnnnnnnnnnnnnnnnnnnnnnnnnnnnnnnnnnnnnnnnnnnnnnnnnnnnnnnnnnnnnnnnnnnnnnnnnnnnnnnnnnnnnnnnnnnnnnatttcaattacgagggttatcccgcgaagcgcaactctctaccatgagctcatccacctcgtcgttggtactgacaaaacacaagattacacttgtaagttcttgtcggatatgttaggtcagaccaacgctgataacctgaagacgaatggagtaagatgcaaactgcgctcaagaagcccaatggtacgccgtcgaagaaagaagaggaaaaaactgggcaatattgggatggaatgaaatatcaggatatcatgcgtcaaaatcctgagacatttgtcttcttcagcgtggggtattggtattttctgcagactacatggaacaagaatgcgcggaagcggtggagcttcgatactggtgcagctcggctcgtggcgatataggcaaatgacgaaaatggaaatggacattttctagaagcgaaatcgacaaatttggtacacaatcactgttcaaagtttgacagggccttgaaagctgcctttttgcttctttcttatatacagttgcatagaaagcactttgggatttgggacttcacacttgtcctcgcttgttttcacttgtttgtcgctggtttgtttcgtataattttgtacggcagaatacggagtaagatcgtgagagttgctctattaagggtatgaggaatttagtagtagtcgctaccaatagcaaagagtaaatttcaaatcaaaaacaaagacattcaagcaagagtgattggcttgaaatcacaaaactcttccttccattccaaggctccgacgctttctagcttatcaacaaacttctctagtagggttctcgcgtcccacataagatagccactgttggaatatttcccaacatgcctatactcggcgctctttgcgtccgtccagaagtgcggccatagcatcaactgagcttcttggccatgcacgagctctgttccaatggcccatatctttaatggaaggtcggtttgacgacgcttcacaccatgccgcacaccgccaatccctgcagccggttcacgaataccaatcaaatccgaaatctgagtcttctgggcatcggtcactggtgtcaaaaagtatatccagaacaattccacgtaagagcacgttaacgcatcaaaccagctagggcccacatagtcggagctcctctgcgaaaatgtctctcgagaggacgtagctctgattcctctagcttcgaggttctcccgatagagctgggcggaaggcgaggccatgaatgccctcatatccgaggctctctcccatgcttggtggcagttagcgggacgacctttgattcccggttgatacacaactcacctgtaactaaaagaattgtatccgggcgctcctgcactcttgcatacccggaaccctcgtgccctggggcccgaagcagtggctggaaatgtccagcccattcggtatccagctccagtcccttggaaacttgaaactcggtccagattaggattgcttggtcgttgaggtcgtcaacctgtgatcgatctatagtatcatctcccaagggcgccatgactggagagggttgattcggatctgaacaggatttttggagagaacgactgggggcactggggttttactaagggcactagcgctagcgttgtttcgcctttggccactattcaacgcggtccctttcgtttcaatactggtaatgctatggtaaataaaccacgtgacatttctccttggcgttgtgagaaatcatattagtcaccatacttcgaatattgaagctatttgttagagtggtcacgtgattagcatgtgatcagccacgtgatcccaccgagtcctagccaatgagactataccgccgccaagtgcggttgagaaatctgggtttttacaaggatgcggctagtgatgggcgcattgctacagacgttgtgaatcaaagcacttcattactcccaccgttcatgcacgcgagactaaggccgtgcgttgatcaccagagccggataatcccgcaatcctctcagagttgactccgctttgaaatcgtaaatcaaacccgcctgagacaggaggtcagtaatatcccgaatacacaatttattagcgcccggcagctaagccgaaagggcaactatctttgatctactatacatgtcataatatatatagtacgatgtctcctccgagcccatacatgaagccttgcaatatatgtcatctcagatgtccgtatcgcagcggatcctcgtgggttagtaattgtgttagtaggctggcttgaaggcgcttctccaagtattcaacatcctattttcggcagttgaagcgcgtctaccgtctgtaacacgaggtggttggtgggttagatcggcgaaaggggggtgatttatgttcgtcggcgtggttaggtggcctcgagtcggcccgtggcgatggcgaatcgtattgaggcccgtaccgcgtctaagttcggcgtccacttctgatcatcggaaggcgactttcctcctaggaagaaggatatgtttcctcggtaggtgttggtacattgtaatagttccatccggtgcgccgtccatttttgacatcgaaataggaagtgnac

SEQ ID NO: 154 - DNA, 2508984 bp, Penicillium roqueforti (residues 1-1,254,492 of 2,508,984)
  misc_feature (1216)..(6722): n is a, c, g, or t
  misc_feature (98486)..(98857): n is a, c, g, or t
  misc_feature (139994)..(140089): n is a, c, g, or t
  misc_feature (294350)..(294525): n is a, c, g, or t
  misc_feature (357379)..(357564): n is a, c, g, or t
  misc_feature (460976)..(461052): n is a, c, g, or t
  misc_feature (472568)..(472749): n is a, c, g, or t
  misc_feature (615733)..(616014): n is a, c, g, or t
  misc_feature (740403)..(740511): n is a, c, g, or t
  misc_feature (916304)..(916440): n is a, c, g, or t
  misc_feature (1075456)..(1075601): n is a, c, g, or t
  misc_feature (1089928)..(1208428): n is a, c, g, or t
  misc_feature (1220018)..(1220059): n is a, c, g, or t
  misc_feature (1222419)..(1222592): n is a, c, g, or t
  misc_feature (1322112)..(1322182): n is a, c, g, or t
  misc_feature (1378264)..(1378636): n is a, c, g, or t
  misc_feature (1383307)..(1383666): n is a, c, g, or t
  misc_feature (1417348)..(1417608): n is a, c, g, or t
  misc_feature (1457330)..(1457524): n is a, c, g, or t
  misc_feature (1553516)..(1553586): n is a, c, g, or t
  misc_feature (1556418)..(1556522): n is a, c, g, or t
  misc_feature (1568119)..(1568214): n is a, c, g, or t
  misc_feature (1711248)..(1716990): n is a, c, g, or t
  misc_feature (1761953)..(1762094): n is a, c, g, or t
  misc_feature (1945830)..(1945927): n is a, c, g, or t
  misc_feature (1956430)..(1956552): n is a, c, g, or t
  misc_feature (2133157)..(2133260): n is a, c, g, or t
  misc_feature (2256500)..(2256658): n is a, c, g, or t
  misc_feature (2267826)..(2267857): n is a, c, g, or t
  misc_feature (2288169)..(2288337): n is a, c, g, or t
  misc_feature (2341570)..(2341588): n is a, c, g, or t
  misc_feature (2431195)..(2431540): n is a, c, g, or t
  misc_feature (2438904)..(2439354): n is a, c, g, or t
  misc_feature (2445186)..(2445330): n is a, c, g, or t
  misc_feature (2482622)..(2482830): n is a, c, g, or t
  misc_feature (2508978)..(2508979): n is a, c, g, or t
  misc_feature (2508981)..(2508982): n is a, c, g, or t
ttaaggtaagaaaaataagtcctacttagttaagtagtatggctataacgatattaaagtaacctaggaaccgcaatctataattaaggatactaaggcccttaataactataaggctaagttaactatagtaacgaaaataccgaagaagaataggactaagaatatatacccgaaatataagaagctttaattatagattaaaatttagtactacgtttcctatacttatatataggtataggtagggttattatatctaaccagactcaaatactaacagagcagtattaaaaatataataaagcagcgaaacagactctatacttagggtatcctaggaagtaggggctaagtttatagggataaataaagcgttactaggtatacctatattagaaactacgctttcttccgtaatactagtaggagtatcgaagaattcctcagctttagagatttcccctatattctctataactcctagggccctaataactttagcgaccactgtaacctctgcggcttttataatagtagtagcctttttagccttattagctatataggttaagcgcttaacattctactcgataatatatacttagggtatacgagtatatataggtgatatattaagagcggtataggtagtagactaaaccttagaaggaagctatactattattaataacgaattccttcctataataatatagttaaaaaacttataaggatataactgtactttacagaagagtagtaaatatatttagtataacctataagggtcttatacttatggtctaggtagctttataactggaaaaagtaccgctagtaaggtaatagcctctcgataggcttaggggtttctaagtatagaggtagagttataggcctatagcctactaaaagataacgttatacctatagatatagagatttatcctccttagaggaggatagtataggacagcaatatactattactattttataaatatagttagtatataaatataaaaataaggccgttttctataaggaagggacagatataatattaaaatttcttagtatactatatagaatgtaatactactaaatctaaagatatatctactatatttactagctaatagtaataccctaactagaataatattatcttaatagaagtataatagaaatttaatagaaatataaattaggnnnnnnnnnnnnnnnnnnnnnnnnnnnnnnnnnnnnnnnnnnnnnnnnnnnnnnnnnnnnnnnnnnnnnnnnnnnnnnnnnnnnnnnnnnnnnnnnnnnnnnnnnnnnnnnnnnnnnnnnnnnnnnnnnnnnnnnnnnnnnnnnnnnnnnnnnnnnnnnnnnnnnnnnnnnnnnnnnnnnnnnnnnnnnnnnnnnnnnnnnnnnnnnnnnnnnnnnnnnnnnnnnnnnnnnnnnnnnnnnnnnnnnnnnnnnnnnnnnnnnnnnnnnnnnnnnnnnnnnnnnnnnnnnnnnnnnnnnnnnnnnnnnnnnnnnnnnnnnnnnnnnnnnnnnnnnnnnnnnnnnnnnnnnnnnnnnnnnnnnnnnnnnnnnnnnnnnnnnnnnnnnnnnnnnnnnnnnnnnnnnnnnnnnnnnnnnnnnnnnnnnnnnnnnnnnnnnnnnnnnnnnnnnnnnnnnnnnnnnnnnnnnnnnnnnnnnnnnnnnnnnnnnnnnnnnnnnnnnnnnnnnnnnnnnnnnnnnnnnnnnnnnnnnnnnnnnnnnnnnnnnnnnnnnnnnnnnnnnnnnnnnnnnnnnnnnnnnnnnnnnnnnnnnnnnnnnnnnnnnnnnnnnnnnnnnnnnnnnnnnnnnnnnnnnnnnnnnnnnnnnnnnnnnnnnnnnnnnnnnnnnnnnnnnnnnnnnnnnnnnnnnnnnnnnnnnnnnnnnnnnnnnnnnnnnnnnnnnnnnnnnnnnnnnnnnnnnnnnnnnnnnnnnnnnnnnnnnnnnnnnnnnnnnnnnnnnnnnnnnnnnnnnnnnnnnnnnnnnnnnnnnnnnnnnnnnnnnnnnnnnnnnnnnnnnnnnnnnnnnnnnnnnnnnnnnnnnnnnnnnnnnnnnnnnnnnnnnnnnnnnnnnnnnnnnnnnnnnnnnnnnnnnnnnnnnnnnnnnnnnnnnnnnnnnnnnnnnnnnnnnnnnnnnnnnnnnnnnnnnnnnnnnnnnnnnnnnnnnnnnnnnnnnnnnnnnnnnnnnnnnnnnnnnnnnnnnnnnnnnnnnnnnnnnnnnnnnnnnnnnnnnnnnnnnnnnnnnnnnnnnnnnnnnnnnnnnnnnnnnnnnnnnnnnnnnnnnnnnnnnnnnnnnnnnnnnnnnnnnnnnnnnnnnnnnnnnnnnnnnnnnnnnnnnnnnnnnnnnnnnnnnnnnnnnnnnnnnnnnnnnnnnnnnnnnnnnnnnnnnnnnnnnnnnnnnnnnnnnnnnnnnnnnnnnnnnnnnnnnnnnnnnnnnnnnnnnnnnnnnnnnnnnnnnnnnnnnnnnnnnnnnnnnnnnnnnnnnnnnnnnnnnnnnnnnnnnnnnnnnnnnnnnnnnnnnnnnnnnnnnnnnnnnnnnnnnnnnnnnnnnnnnnnnnnnnnnnnnnnnnnnnnnnnnnnnnnnnnnnnnnnnnnnnnnnnnnnnnnnnnnnnnnnnnnnnnnnnnnnnnnnnnnnnnnnnnnnnnnnnnnnnnnnnnnnnnnnnnnnnnnnnnnnnnnnnnnnnnnnnnnnnnnnnnnnnnnnnnnnnnnnnnnnnnnnnnnnnnnnnnnnnnnnnnnnnnnnnnnnnnnnnnnnnnnnnnnnnnnnnnnnnnnnnnnnnnnnnnnnnnnnnnnnnnnnnnnnnnnnnnnnnnnnnnnnnnnnnnnnnnnnnnnnnnnnnnnnnnnnnnnnnnnnnnnnnnnnnnnnnnnnnnnnnnnnnnnnnnnnnnnnnnnnnnnnnnnnnnnnnnnnnnnnnnnnnnnnnnnnnnnnnnnnnnnnnnnnnnnnnnnnnnnnnnnnnnnnnnnnnnnnnnnnnnnnnnnnnnnnnnnnnnnnnnnnnnnnnnnnnnnnnnnnnnnnnnnnnnnnnnnnnnnnnnnnnnnnnnnnnnnnnnnnnnnnnnnnnnnnnnnnnnnnnnnnnnnnnnnnnnnnnnnnnnnnnnnnnnnnnnnnnnnnnnnnnnnnnnnnnnnnnnnnnnnnnnnnnnnnnnnnnnnnnnnnnnnnnnnnnnnnnnnnnnnnnnnnnnnnnnnnnnnnnnnnnnnnnnnnnnnnnnnnnnnnnnnnnnnnnnnnnnnnnnnnnnnnnnnnnnnnnnnnnnnnnnnnnnnnnnnnnnnnnnnnnnnnnnnnnnnnnnnnnnnnnnnnnnnnnnnnnnnnnnnnnnnnnnnnnnnnnnnnnnnnnnnnnnnnnnnnnnnnnnnnnnnnnnnnnnnnnnnnnnnnnnnnnnnnnnnnnnnnnnnnnnnnnnnnnnnnnnnnnnnnnnnnnnnnnnnnnnnnnnnnnnnnnnnnnnnnnnnnnnnnnnnnnnnnnnnnnnnnnnnnnnnnnnnnnnnnnnnnnnnnnnnnnnnnnnnnnnnnnnnnnnnnnnnnnnnnnnnnnnnnnnnnnnnnnnnnnnnnnnnnnnnnnnnnnnnnnnnnnnnnnnnnnnnnnnnnnnnnnnnnnnnnnnnnnnnnnnnnnnnnnnnnnnnnnnnnnnnnnnnnnnnnnnnnnnnnnnnnnnnnnnnnnnnnnnnnnnnnnnnnnnnnnnnnnnnnnnnnnnnnnnnnnnnnnnnnnnnnnnnnnnnnnnnnnnnnnnnnnnnnnnnnnnnnnnnnnnnnnnnnnnnnnnnnnnnnnnnnnnnnnnnnnnnnnnnnnnnnnnnnnnnnnnnnnnnnnnnnnnnnnnnnnnnnnnnnnnnnnnnnnnnnnnnnnnnnnnnnnnnnnnnnnnnnnnnnnnnnnnnnnnnnnnnnnnnnnnnnnnnnnnnnnnnnnnnnnnnnnnnnnnnnnnnnnnnnnnnnnnnnnnnnnnnnnnnnnnnnnnnnnnnnnnnnnnnnnnnnnnnnnnnnnnnnnnnnnnnnnnnnnnnnnnnnnnnnnnnnnnnnnnnnnnnnnnnnnnnnnnnnnnnnnnnnnnnnnnnnnnnnnnnnnnnnnnnnnnnnnnnnnnnnnnnnnnnnnnnnnnnnnnnnnnnnnnnnnnnnnnnnnnnnnnnnnnnnnnnnnnnnnnnnnnnnnnnnnnnnnnnnnnnnnnnnnnnnnnnnnnnnnnnnnnnnnnnnnnnnnnnnnnnnnnnnnnnnnnnnnnnnnnnnnnnnnnnnnnnnnnnnnnnnnnnnnnnnnnnnnnnnnnnnnnnnnnnnnnnnnnnnnnnnnnnnnnnnnnnnnnnnnnnnnnnnnnnnnnnnnnnnnnnnnnnnnnnnnnnnnnnnnnnnnnnnnnnnnnnnnnnnnnnnnnnnnnnnnnnnnnnnnnnnnnnnnnnnnnnnnnnnnnnnnnnnnnnnnnnnnnnnnnnnnnnnnnnnnnnnnnnnnnnnnnnnnnnnnnnnnnnnnnnnnnnnnnnnnnnnnnnnnnnnnnnnnnnnnnnnnnnnnnnnnnnnnnnnnnnnnnnnnnnnnnnnnnnnnnnnnnnnnnnnnnnnnnnnnnnnnnnnnnnnnnnnnnnnnnnnnnnnnnnnnnnnnnnnnnnnnnnnnnnnnnnnnnnnnnnnnnnnnnnnnnnnnnnnnnnnnnnnnnnnnnnnnnnnnnnnnnnnnnnnnnnnnnnnnnnnnnnnnnnnnnnnnnnnnnnnnnnnnnnnnnnnnnnnnnnnnnnnnnnnnnnnnnnnnnnnnnnnnnnnnnnnnnnnnnnnnnnnnnnnnnnnnnnnnnnnnnnnnnnnnnnnnnnnnnnnnnnnnnnnnnnnnnnnnnnnnnnnnnnnnnnnnnnnnnnnnnnnnnnnnnnnnnnnnnnnnnnnnnnnnnnnnnnnnnnnnnnnnnnnnnnnnnnnnnnnnnnnnnnnnnnnnnnnnnnnnnnnnnnnnnnnnnnnnnnnnnnnnnnnnnnnnnnnnnnnnnnnnnnnnnnnnnnnnnnnnnnnnnnnnnnnnnnnnnnnnnnnnnnnnnnnnnnnnnnnnnnnnnnnnnnnnnnnnnnnnnnnnnnnnnnnnnnnnnnnnnnnnnnnnnnnnnnnnnnnnnnnnnnnnnnnnnnnnnnnnnnnnnnnnnnnnnnnnnnnnnnnnnnnnnnnnnnnnnnnnnnnnnnnnnnnnnnnnnnnnnnnnnnnnnnnnnnnnnnnnnnnnnnnnnnnnnnnnnnnnnnnnnnnnnnnnnnnnnnnnnnnnnnnnnnnnnnnnnnnnnnnnnnnnnnnnnnnnnnnnnnnnnnnnnnnnnnnnnnnnnnnnnnnnnnnnnnnnnnnnnnnnnnnnnnnnnnnnnnnnnnnnnnnnnnnnnnnnnnnnnnnnnnnnnnnnnnnnnnnnnnnnnnnnnnnnnnnnnnnnnnnnnnnnnnnnnnnnnnnnnnnnnnnnnnnnnnnnnnnnnnnnnnnnnnnnnnnnnnnnnnnnnnnnnnnnnnnnnnnnnnnnnnnnnnnnnnnnnnnnnnnnnnnnnnnnnnnnnnnnnnnnnnnnnnnnnnnnnnnnnnnnnnnnnnnnnnnnnnnnnnnnnnnnnnnnnnnnnnnnnnnnnnnnnnnnnnnnnnnnnnnnnnnnnnnnnnnnnnnnnnnnnnnnnnnnnnnnnnnnnnnnnnnnnnnnnnnnnnnnnnnnnnnnnnnnnnnnnnnnnnnnnnnnnnnnnnnnnnnnnnnnnnnnnnnnnnnnnnnnnnnnnnnnnnnnnnnnnnnnnnnnnnnnnnnnnnnnnnnnnnnnnnnnnnnnnnnnnnnnnnnnnnnnnnnnnnnnnnnnnnnnnnnnnnnnnnnnnnnnnnnnnnnnnnnnnnnnnnnnnnnnnnnnnnnnnnnnnnnnnnnnnnnnnnnnnnnnnnnnnnnnnnnnnnnnnnnnnnnnnnnnnnnnnnnnnnnnnnnnnnnnnnnnnnnnnnnnnnnnnnnnnnnnnnnnnnnnnnnnnnnnnnnnnnnnnnnnnnnnnnnnnnnnnnnnnnnnnnnnnnnnnnnnnnnnnnnnnnnnnnnnnnnnnnnnnnnnnnnnnnnnnnnnnnnnnnnnnnnnnnnnnnnnnnnnnnnnnnnnnnnnnnnnnnnnnnnnnnnnnnnnnnnnnnnnnnnnnnnnnnnnnnnnnnnnnnnnnnnnnnnnnnnnnnnnnnnnnnnnnnnnnnnnnnnnnnnnnnnnnnnnnnnnnnnnnnnnnnnnnnnnnnnnnnnnnnnnnnnnnnnnnnnnnnnnnnnnnnnnnnnnnnnnnnnnnnnnnnnnnnnnnnnnnnnnnnnnnnnnnnnnnnnnnnnnnnnnnnnnnnnnnnnnnnnnnnnnnnnnnnnnnnnnnnnnnnnnnnnnnnnnnnnnnnnnnnnnnnnnnnnnnnnnnnnnnnnnnnnnnnnnnnnnnnnnnnnnnnnnnnnnnnnnnnnnnnnnnnnnnnnnnnnnnnnnnnnnnnnnnnnnnnnnnnnnnnnnnnnnnnnnnnnnnnnnnnnnnnnnnnnnnnnnnnnnnnnnnnnnnnnnnnnnnnnnnnnnnnnnnnnnnnnnnnnnnnnnnnnnnnnnnnnnnnnnnnnnnnnnnnnnnnnnnnnnnnnnnnnnnnnnnnnnnnnnnnnnnnnnnnnnnnnnnnnnnnnnnnnnnnnnnnnnnnnnnnnnnnnnnnnnnnnnnnnnnnnnnnnnnnnnnnnnnnnnnnnnnnnnnnnnnnnnnnnnnnnnnnnnnnnnnnnnnnnnnnnnnnngattatgggtttcccggcccattggtgggctgggctgggctgggctatgggctgggtgggctttgccgatgtctacctataagtaactttaagaatactcccgaaaagatcaagcagttctatgatcagtacccgtagaagcctagaccaccgatacgattataagaatagaccgatactgcagataaggatagattcttagataaccacgttaacgataataaacctgcatttaggggctaaatgcattcttagccgggggttatataatgatctaagaggatcgtacttgcctaacggggcaggagcggtcacgtcctcgtacttgccgtaggaacgactataccctcgcaccttcctaaaagaacgaacgagaattaagtgagacaaacgcaagagtataagaaggaaagaacacgcacttagatagtttctctttttcctttcttcctcgtacttagaatttggttggaattgcactcttttcctttgaattgaattggctcgtaacaggtatggcgagagcgaggtccttatcgttgaggtaaagggcggcgctaaggggagcaatcctattccctaactcctcggatatatgggttatatctcgctatatgtattaaactatatttaagcaagctaatcggtatgaaagggtgcatccaccgtggacgtaaggacgagcagaagcgcaactgcagtgtctacggtatggcgtatactggatccgttcggcattttttgaaaataagtcacgagtcaaaggtaagctggttaataccagcaaagaacacaactctaatatttattagcggtcggaatttgctactgtcggttgtcgaggcgctctcgagcagccgttcggtttgctagtatggatgctgcggagggcagctgccatctccccagcccactcaaaggaaaactcagcggaaactcatagtttggtggggtctgaggagatggtgtttgaatgagcggtgctgaggggaaggaggagtgttgtactgattcatggcgcagtgtggtgttggctgatacctcttcccccttctcacttgagtcagctcttatcgcgaggtcaccattactagttggttaatctcttaatacaataacctcaaaaaggaagtgctcgcctcttactcccatgagttcgtgataagagtgctctaaatatttacatattgtattcctattcgaggaacatggccatcggtgcaccttcgtacaacatatactcatagctgcggaatcttggaacctcggaccagcgtgctgcgtacgtaatacgaggtttttaggttttcagggacaggcctggaattatagtaccgccttcctgatctagtactattcaggattctgccatatttctaccgcactttattttttccgccatgtacatatattctatggagacatgcattttgattagacaaaatcttatattctgcctaattcctgtagtattcaactctggatccggatctagcatatgaggcaagaaaagaaaactggagatttcatagttgggggcagcggaggataccgtatacgagggcttatctatttgaaatggcccccattctacagttacaggggtcctcacaaagaggccgaaaagcacaagagacaacgaaaaacatccaactggataagttcctcaatgttcgtcctgtcgagaatacgaagcctcccttcttccaattggtggccgcaaaaagtacctgaagggccttacgataagccctacgaatacctttcaaagcgcctcacaggacgccagcggggctcgaaagggccgtcaaaatcccaaggccccaattagaatgaatatcttcgattatacgctggaggtttattcggtacgatttgatccccattgctacttttcatactgtgacggtgtactccgtacagaaatttgtgtgcagataaggaagctagataacccgtcggagcttacgggctagccaaacgttctaaccgctttagcctgacttatacgtaaggtagagcggcctcggcatgttcgggattcgagaccaatgtcactctccatagagagaggaaaagcttctttgtgtctgcgttgaacttactccatactgagtacctggatcgagtggcgctccaatcgtagatttaagaatgatgcagtctgcagccaatacaatggtgttacccctcaacgtgccatgcatgctatgcatagggagtggaggtaatccagggtcaattactcttgatcacagcagggttgaatttttacagttttagtcgcaatgggaaccttggaatcacggaatactcgagaccgctctatcctgactattgggcagcgttgccctcactaggatcggcgcgtttgagatcggcgcgttgagatcggcggcctcaacgtcgggaactcaatgctattgatgagaccaagctttatggtccagcagaagctgcagaattttcacgccacggatctcagaacggcctatcattgggggaaaattatatggccaaacctggaccgtagtggaaaacaatgtggatgaaacttacataggtgaacacatgggatcgatttccttgccaagtaacctaattacctgccaagagccttggcaagccctagttcgggaagtggattctccagcacttatctacctcgtactccgtacggagtacgaggtactccgaggtactccgtatgtacgatgtatgtaactctgaaatatctacgcagctgataggtgggctattaattaacaaaaaggtgtgctccatgttttgcattacatagtgtagatcattttcattctatatgataatggccaaattacataattgtagggcggattgttgccaatgctgccatgtggacctttccggacatagcttccaatactttgattgatcgcccgagtaattaccctaaatctatcaaaagcccgagcttctggaagcgtatggagtaggtgtgagcatttcccattttatagccatgtgatcggtggtgttggcaatggcctaaattgctgatcagaagcgatcctaaaatccgattatcgtgtcgccctgcctagatccacttcatatgtggtttaagagacattatcattgattgaaagttcttcatgtagcgaaattcggagatttcatgtgaaattgtatagagatatactcagaatatgcatataatcacgctagtttattcgaaacggcgatcctgaaggttggcttatcaagatcatgccggtatattactgcattcggcaaaaggaaattcgaataatatcaaacagaaagtttaataacaaaaagctcaattgaaacaggagtccgattttgacattcggcctccggaaactccaatgtctatcaagaccctagactttcgatcacatcacggccctgagatgatagacgacatgatgtctctatctttgaccaataccatcctctcagctgtgtgatgtacaagctgatctatccgaccatgaacggaattccgtgggtagaccatgagtatcgggatgccctgcggatctttctcttctcagcctcgaccgagcttgccgccgtactttgcatggatgatttcgggatcacaatgaggtctgtgatgtaacttgcaagatgtcggtggatcgggtggatatcgttagtggatacagtaagctgtgaaggactcctacttttgggtctatatcaggtttgtagtgggtgttactagggaatggggcagcatataagtcgtgaaggacttctcctttttgggttgtgtatcaagttgagttgagacattatctgcacaaaagatatatacaatggcagacttatcaagatcttcgtatgttttgtgacatttatcatgatcttttttccacccctttttggatgtcctattgaagtttcttccaattctgaccgtcatacagacttatagaacagcttttacacctccgcagtgaggcctctcatccagactcttgccgtcaactctccgctctattatccctacacaccggctcttggcccatccgtcacctaatcctaacatttcaggacatttacaagtccattcccgaatccatcaaggccaacaacaatgaatcaattacctacctccgtgcacaagtcaaagcagccacccccagcgttgcggaattaatagggacagactcccgcgccggtctcatcgatgctaacaccggacggcatctgacacatattgccatacggcagttcttggagagtttccagcttcccgtgggactctcccgtcatggaaagcctcgcatcgctgtcatcttgcctaacggccctctgatggcagtcgctgttcttgctttcgtcaacaggtacaccattgtgcctatgacaacgaacacggtgccagagcaattacagacagatatagaaaactcgcaagctgatgctgttgtcgcgctggacgctgacattggcaagctgcagctgaacaatggcagtcggccagtgtttggtattgagcaacttgaagacatgactttccgggtggtctctgcgcacaatgcttctggtgcatacaaccatccccccaattctggggacgatatcgccattatcttgttcactagtggtactagtggtactaagaagctggttcccatcacaacttacaacctcatcgcgggtaccatggctaccatagagtcagtcgaactgtccgagacagatatctgtcttaatatgatgcctctgaaccatgtgtatgttccctgccaaattaaattataggaagacagctaacattatcagtggtggcatcatgcgaagtatcttctcacccgtactcgccggcggtgccacaatatgttgcccctcgtttgaccccagcatgttctgggatgccgtgcaaactcctcatatgacaccaacttggtactatgctacacctacaatgcaccagatgattcttgctgaagctgagcaccgccccgatgctgtcaagcaaagtgccatccagtttatctgcaacgctggtggtggtctccctccaacacttgccgtgcagctccatgatattttccactgcgccgtcctccccagttacggtatgactgaatgtatgcctattgccgcgccaccgaggagctacaagcttgatcgccatggaacatcgggaaagatcgtcggtcctgaggttgcaattctgaccgagagtggcgagcctgtccagcaaaatgggatgctaggacacatctgcattcgtggatcacccgcttttgaagggtatctgacccctggaggcaagattgacaccagtgcattcaacgaatccggctggtttgatactggtgatcttggacacctcgacgatgacaactacctgtacatcactggccgcagcaaggaggtcatcaaccgtggtggtgaaattatctctcccgtcgaagtggaaaatgcaatcctgaccacagccaaggatcctgaatccccgctgtatggtcgtgttactgagacgttagccttttctgtcccagacgaggtactgcaagaagttgtcggtgtggttattgtcacacctccgggcttcactaggccggatcttcgccagatacacgaagcactgcagcctattctccaccagcctaagtggcccgctctggtagtatacatggacggcgtgcccaaggcaaacaacaaaatccagcggatcaagctcgcagagcggctgtccctggatatcttgaccacggccacacccctggcaagcaggcactacgaagctgtctgcccacctactggcgctccactcagcgcatcaatctcgaagaacttgtgtgtcatcgatgataaaataatccgctcagttctcaccaagagagcaaatacccctgacatgcacgtgcaaataaacccgcgcgatgggctcgcacaggttattttgtttgtccagaacccagatgatgaccatgtgacacctggcgagctccacgaccacctccatggctatctcgtacctagccgtatcattccactcaaaggtcccatgcctctcgacttctacggaaaccccgactcggccgcgatcaatgaggccatccttgcccgcaactcggatggtaacctgtcgcccattcagcagcgcgtacgtgagattttcgctgtggccttgtcttgtgcaccagaggaagtatctcgtcttaccgacttttttgctgctggaggtgatagtcttagtgctggtcgaatggtttcgcaacttcgtcgcgaattcgctattttcctggccggtgacattctcttccaccacagcactgttggagagatagagcacaagatcattgaagctgttgaagttaaggctgccaagggcgacgatggagaagttgacttgcccggttgtgagaagacatacagcagcacgaacccaattatcttgctcctacacctgttaccgactgtgttctttttccccatgaaacgcgccttccaatggatcatgttcgcatatgtcgtggctgagtgctctaatcgatttcccattcgtgagaacctcttcgctcgtttgatgctggttgtttttgccgtgatgtctgctcgcttatgttcacaaattgtgtctcccatctttgctatcatctttaagtggctcgtcatcggtcgctacaaggagggcatgtcacccatgtggggcccgtaccatacgcgctggtggttgacccagaaggtattgcaggtgtgtggaaagggactcttcaacaactacaactggtcccgcattctcttctaccgtttaatcggcgcaaagattggcaaaaatgttaccatgtccgcgtccgctaagctcggcgagtatgatcttattgagattggcgataatgtcgttttggatacctgcatgtgtcgccccttcggcgtggagcgcaatacctctatgcttttgaagcgcattcgcattggcaaagactcgtcgatagggatcaagtctgtcatcgcccctggtgctgacatcccggagaggacctgcattggtcccaactcgtcgagctgggaacttcgggacgccgatgagtctaaccgccaattgctgacctcccagatccccaagcctcattggatctggattctctttattgttgagccaatcaagttgatcacctggacagctgctcgtattacctggatggccgctcttcttcctatggttctcgagttccctactcctgcggcagacatgttccggtctaccctagaatggtacaccagtgatcagcggattgcgttccacatcaccgcaaggatctgtcgtgctgttggtggcccgattgtgctttttattgcagtcttgatcatcaagttcttcctcgatctcatctgtggcaagcccagacctggtcctgcctcaaaacagaccactcgccaaaagattcggagtgcggtgcttgcgcagattctgcccgcaggtgacatccacggactcacccgccttactggtcgtcactacgaatttgtttcaatggctgtccgtgcccttggtggcaaggttggcaagcatgtctactggcctagtgttggtcccgtcactgtcgactttgatctcattgaggttggtaacgatgttgtttttggttctcgctcgactctggtcacatctgatggctacggccgtgatcgcatcgtgatcggtgatggcaccatggttggtgatcgtgtcgtcgctttgcccggtgctaccatcggccgtcaagcaatgataggctccggtgctttgcttcgccggaatggggactaccctgccaacagtgtctggactggtagcaagggtggtgaagctatacagttcccaagttccacctcgacctccacttcgaccgctccaaccatcatcggagatggtggcagcagccccaacactagcggcagcgaagacgagaaaacaccgaccgaaaagcagacctactgtggaactaaagacaaggctgttaccgagatcgctgagcaggaagtggatacatgcaagcctttcggtcgcgccttctaccgccacgaggccaactactacgtcctccgcatgtggcaaattgtcatctattccacttttgcagttattttcactactgtgtattggcttctcaccgtcttgttctcccttttcgttctccgcagtgtcctaagctacagtgatgctgctggtttcaagcaaggcgcctggcgcccattcgttctgtacggcacgctcgcctcgatcctatctgtcatcaccaccgttcaagtcgcccttgccttcggcattattctctgcatcaaatggacggtcgtgggccgtcgcaaggaaggctcctaccactgggacaagagcagctacaaccagcgctggcaattcctcctttcctgcgaaacgttgatcaaagactgctatgacggagttggtctcctgcccatgatctctggctctgcctacatttcctggtactaccgcctcttgggtgcgaacattggaaaggactgtgcgatacacgccaacggtagtcccagcatctttttcaccgagccggacctccttacccttggtgaccgtgttgctgtcgatgatgccagtttggtctgccacttgaactcccgtggtggattcgagctgcataccttgaacgttggggatcggagtatcctgcgcgctggatcgcgcttgatgtctggtgcttcgatgggccaggatgcttgtcttttagagcatactctggtcctgtccggagaccatgttgagaatggagatacgctccagggatggccggccgaaggatttgacgggaaacgtgtttagaagtcttagattgttttccatttcttggcgctttgtctttgtcctagagaacagatagactagcaattttagatcggacttctcagattttcattattgttatattgtcatcgagaagatcaagtgcattttaattatgaacagaaatatgccacttctatcacattcttatctgggaattactataccacacacccttttggaccacttcaggtaaggcctttcttatccctgttttgaagactcttttgaagactcttttttttacccatagacctcaactgcccattactcgtatttgtaggatcactataatctattatacgaatcacttcataatctagccggcgccagtatcatgcgacagcctttaattatcaattatttaccggttactttacgaactgcgttattatttcaccatgacggcttcaactgtaaatttcatacaatctactttctaactccgagcccaagatcgtcccgaatccctccccactcccccaccctcactccactttccgccccggctgtgataagaaccgagacaggccacgaggccggctccgacactcgtggtcggctccgacataggctccagcctccgacataggcccagtcgaggacgtagatactagaagggggaaaggcataaaaaccacggagtactccatagtataatcaaccttgcaagatacaaaaagggattgttacagggacccctccaattgctaattcgacccccctttgactaataggacccttgattctgctttattctgccttgcacataaggcaccactttaattctgccagccttaattctaaggcagaagaagaatcaagcggcagaatatatacccggaccttgccaagaccaggcaagtggcagaattctgcctcgacccgatcagaaaggcggtatgtactgaggtcaggtgcccgagattatctaaggcgtgccaaggcctcaagatcttatgcatctttggttttatttgcaattgccagttcctaaattccctgggattttggggatgttgttctttactttcctttgtgtattgctttgttgttcttgttcaaaatatgtcgataatctaattctaacccacctatcagcagatggaaatctggtaggttgaagtcctcaagatcaaccacgcaaagaaagaaatcgactaccctctggtgtttattcacaaagaagcctctaattaagtccaccaagaaatagcaagagaccaaagtgaatcatctttggtttctttgtcggtctaaatctctttggagtcgacatgatcagctttgggttttcggagatgctgttcttttccaaacatgccattggtctaatattatcttcttggctagagagtttataatcaaatcttaaaagcacccacatagactctttgatgaaactgtctggtttggatcctagttcttagatgcgtgttctaatgctaaaaatggaattgattctttgagcttatacttcggccttctggactcgggaccgacgttaccttgaggcatttcttatgggacttgcaaggaagctctcctcggatgcagctgtaaataagacgatgtccttcgcaatcgacaaatctaatacctattcccaatctcgagcctccctccttacctcttaccgtttccttccaaaactcatactttattcaccattgctttcctcgatatgcctgagccccagtggtctaacgctcaaatacctaaggggtttccccgagattggctaaaaacccacgacggctaaactgcacctatgccagaggtgcataagattcacctactgagttcaaattctgacgacactgatggactgaaaagctcaaagaccgaggatcctattgaacttccggttctcagcccgaacgatccggttaacgaaatgtataaagtggccctctcaacattcctgcacgaggaattccaaacaaactatatgataaaagacgaccctttgcattacgaacgacgctacgtcgtttggcccggcattgacttgaatagatttcgattaatcgacaccccagctagctttttccgagtgctagagatgtcgcttttgtccgaacatatatatgaaccagaagggaagaaatggccagtctcagccgcaaaaagacgcacgcgccttcttaagaacctttgggagcggggggatatacggcttgtcgatgagaagcccctcctcagtgaataccaagtgcgccgcgtggcatcgacaactcgttctgaagtcgagacatatcgagaatttcttcgttgccagcacttcaacatgggaaaagagatgattttccctgaactttgggaggaggaggaagaaggttggtattgggaggagaaaaaaaatcatttacatggctgtatacttgcttaatgctacctcgtgttctacatttctatttctctcagataagtatcttaccattgcctctgtcgctgcttgaactcctcaccccttcgtggattacatatctagttcgctcttgttaatgaatactctgggtctcttgcaatttcacttgtactttagcttgatcaaatcctatcatgatatgttcagatacacaaagaaccaagcaatgtaggattcagaatgtcctaccctctcaatcgagagagtcgttgcaagataaccaaacaaggaaaattgcgacaatttgttttagagtgcattgtcttagtctctcaaagcggtcgacaatggcctttggtttgaagtaatcagaatatggattaaggcataatccactaatttctatgggtgtaatacgtacacttagaaagacaagaagcggaaggttcaatggattcacacaattatatccactatctgctattcgcgccattgcgaatccgatatgaaattcgtcacatggaacttagaggagatctagttctttgaagcaatcactattgattctctttttgagacatccaactcatcatcgtgagttttacgtggacaaaggaaataataagcccagtcctgacgattgttggacagacaacaaatagcctattaaattgaagcgaaatgttgatatggtcgcatactggaacatgaaaccattgtacctagaatctgtgactatggggtacacgatttatcaattatagttgagactagacgtaataaagaaatgggttcagcacgtaaaaggctatactatataatttgtaagtactatcgctcatccgggggtttttattttcactcacttctccgatctcaccaaacatggaagttgttgctacggtcattagcatcacacgactcttccgacggttgcaagatcgggtatcctcccatgcatcctccattggctccttgctgcttgccatggatacgtgagatttccgtaattcaatatcaagttactgactaaccattcatacctaggtactatcaaaaaggattccaggaaaagcttgatatcaagattgatcgcctgctgctgcttcaggaaaaatctcggctacccaatgagcttggcacccagcaggttggcacggccacctctttgcccaacaaaagcaagccattcaccattcctcgacttgccactgacttttatcgagagtggaatgattaattcgaggacttgttgcaaaagctcaacccttctttggttgagggccccgaatactcaaatcgaatgatatatatatctggcgatgcaggagtaggaaagacatacttgtgttctgaatttgcggagaagtacaagacttggtagggattttaccctatactctgcttcatatatatcttactccctattcaaagtcactccggcgttctttggattgatgatgttcttaatgacatctcagcattttatgttgagaacaaccgatttgagagcctcaacatcccaacacaggcggcagatgtggttaactggctgactggggttcatgggccatggcttttggtcattgatggcgctgaagatttgacaaaatggaaatgtctttcgtcttgcggtgacaaaaaaacactttcttatcacgaccagaacaacccaatcggacaccgctacctctgttcatatctcagggatggacactaaggattcacaggaattccttttgtgggccgcgggtttcttgaagccttggtttgtctcggatcttgcgtggagtaatgatctcattggcaaacttggttccaatgcgctaccccttgccttagcccatgtgggtgccacggtgcgcaatggcttttccaccccagaagactatctggcgctcttggaagagcaacagacaagggaaacacaagcagatccttcgcaagatttacaaaggttggcctttgaagtggctatcgcacaaattcgaaaacaaaaagatcagccatccaaggatgcacacaaactcctcaacgctttcgcctttttccccaatagacacatgtctttggagacagcaacaaaagcaatcatcacatccaggactattggcggggagcagcgacggagataccacaagagatatcccacatcaaaactcatcagacggaatgggaaagcctacaacacttctcaatctacatctcgtcggcaaagctcggattctgttgccctttcacgagttcactgggcgatcatggagctcctcgatatttccgcggttatatatcgcccaccaagtggtacatactcgatggaagctgtcttgaaaagctggatcgcagacagcctaggtcaatctgagcgcgaagtttggaaaaacttagctgacatgatagccccgcaaaaggcgtccaaagaatccctttgatagttttttgacagaatttccttgttccggatttagtttgttgtgttttcccttcttttcttcagtgtgagttggttatatagtcgaatctcataatcctatcttctagtttttccaatcttccagctgtgacgagccaagtcttgcaaagatggaagagtgcatcaattcaaaataactaagataggggagaaagaagaagcaaggtgcaaagtgggaaacagccagttcttatagctgaccactttgtagacaatgtaaacaaccaaagaaacaaacaagcaaacgttgcgatcgtaacaccagccttcattcttggattcacccatttacctagatatctgcctgatgagacttgaacttttctcaaaccttcttttcatttattgaagatacgaaggtgtatagcggccaacagccatgcctgattttaatggtttttacggagcccgttgatcaattagtcaacaatagtcttgtgcaagggatttctcatagtcaggaacattttatatttcataccagtaattagtcgtcgcagagcaaagcgacttattctgacttctaatgctacgcaaagtatgactgtagaagctctgggaaagataatgatggttcgttctctaggtatggaccgtcgggatatgcccgagaggcccacgtgaccgtatgatcacaatctaaccaaattaggcctagtctatatttattctgccaaaggacatttcaccgcatagtttcccatgaacttcgaccccagtgaagaagaggatgttcacatgacatcgagattatgattcattgttgctttgcttcactccgcaaaaagtataggagctagttttcttgaagttgctgttatataagccattcatggaggcatcttaggcacctcaccaatgaccaatagcgaaaacaagaatagactccaccctctagggcttcgaagagccactgctcacaagacttctatatccttccccgccccgttgctttcatctcttaaacgcatcgagtggaactaacttttaaataaggatcatacgggatttcggctataccatgctgcaagtgagagtgccacgaaaaggtctagcctatagtgatgtctgagtaccatgcacttcccggtgatgtgtccaatttcctccagtagcaatttccgtctgccgcctcttgcgtaaataagattttataccccacgccaacaggtctaccccgcaaaattactatttagagcgctgatagtgcggggatagtagactaatgcactgagagaacgccacaatataggctgaatcatgtttcccggccaatccgaatctgagtgaatcataatatcacttcacttcattagactctgttatgtacggttctttagagtttgaagcaattaccgattattccgcaacaaattttgggaagagaaacagctaaaaatatggcattgaacgcagattcgttccctggtatacaattccgtaagccagggatatgtacatataaatgggtatagctagtaacgtaggataatatcgagagaactaatattctcgtcttttgccggatgagttcaacaaactacttttcatcccccacgcagacgttccttgaccataccccgcctaggagaatgggggtaaagggatagcaaagattcctggagatattttcctcgtatagaatctgtaagagattggtctcggcaatcaaatgagctgatgccagccgtacatgaaatgcggggaacttcacagaaagcgcttcagggaggtattggctttgggctgtttgagatagtcaacctgaaagataggacataatgatcagcagtttctctttcaatgtgctgcaatggtcatgtttttgttattctcaacatgctgatacagtgtgtttgactggacagagctggacaacacattacttggagtgcgttggatcaacgtactttttgacaaagatgagtctgatgttagccaccctccagtacttgaactctgtctccgcgcgcggggtcaatgtagaaggctattggctgtgcatatgggttgagatggggaaattgcctctgtagatacttccacgggcacacaagcacagctatataaggcccctctggtaggtcccatcagaagtctacttattccctcgagcactttcttcataatcattctcaattgctatattgtcaacatattcagagttatgactatcccagacgaagttgatatcatcatctgcggtggcggcagctcgggatgtgtccctgcgggccgcctcgcgaatcttgatcacaacctgtctgttttgttgattgaggcaggcgaggataacttgaacaatcaatggtgagaatgccgaggctaccagtcttaatgaacgtattctcatttcaacctagggtgtaccgcccgggtatatacccgaacaacatgaagcttgattcaaagacggcatcattctatcactccaggccatctgagcatttagatggtcgccaggctattgttccatgtgccaacattcttggaggtggcagttctatcaactttatggtaagtgatacctatctgacagtttgactcagtgatcctaagctgaatacattaaagatgtataccagagcatccgcgtccgattatgacgactttcaagcaaagggttggacaaccaaggaacttcttccattgatgaggaagcacgaaacataccaacgtgcgagcaataacccggaattgcatggcactgacggacccatcaaggtttcatttgggaactatacgtatccgatcaagaatgacttccttcgtgctgctgagacgcaaggaattccattcactgatgacctgcaagacttgaaaactgcgtacgagctccacgatagatctcctattttatcttactaacgaagagtcgtaatgttacagccacggttcggaacactggttgaagtggatcaaccgtgatacgggtaagaacgaaggtccaactttgcatcggtatcattacctctctcacactcagtattaggacgacgaagtgatgcagcccacgcctatgtccacagcacccgagccaagcataataatctccatctccaatgcaataccaaagttgagaaggtgattgttgaaaatggtcgtgccgtgggagttgtgacagtcccaactaagcctcttgacggcggagagccagttcgcagggtcttcaaggcccgaaagcaaatcattattagttcgggtacactgagttctccactgattctccagcggtccggctttggtgatcctgagaagctgcgccgggctggggtcaagcccctggtcaacctaccaggcgtcggccgaaacttccaggaccactaccttactttctccgtttatcgcgctaagcccgacgtcgagtcctttgacgacttcattcgtggagatcccaaagttcaaaaaaaggtcttcgatgaatgggataagaagggcaccggtccattggccactaacggtatcgatgccggggtcaagattcggcctacggagcaagagctcggcgagatgaagaagtggcctaccccagactttacagaggggtatgagtcgtatttcaggaacaagcctgataagcctgtcatgcattactcgatcatttctgggtaagcatctcattcgcttcgttttgaatgccacgaggctaacccacggatagctggttcggagaccacatgcacatgcctccgggcaagttctttaccatgttccatttcctggtatggttcaaagtcaccaaatcagatcagccaaagctgacaacataataggaataccccttctcgcgcggtcacacccacatccagtcggctgacccttacgaagtcccggactttgatgcaggtttcatgaatgacaaacgtgacatggcacctctggtctggggatatattaaatctcgtgagaccgcccggcgcatgggttcgtacgctggagaggtcactgccatgcatcctcagttcgccttcaactcatcggcacgggcgcaagatatggatttggccactaccaaggcatatgccggctccaaccatatttctgctggtattcaacacggtatagtcttcctttccagtcgagttatcccgtccgtctagctaatcaaataatataggttcttggaccactccattggaacccggaaagcagccttcggcttcaactctcaactccaatagacacgaagctcgtccttcgctggagtacaccaatgaagatatccagcacattgagaagtggagtaagtatcaagcatagtaattggtagccccggatcatattgtctaacgcttttgctgcagtttcccgccacgttgagacaacttggcattgccttggcacatgcagtatggctccgcgagagggtaattccattgcaccccatggaggtgtcgttgacgagcgcctcaatgtgcatggtgtcaagggcctcaaggtttgcgacttgtctatctgccccgacaatgtgggctgcaacactttcagcgtgagtgttatgtttgttggttactctgggtttggccaaatactgactattatatccgatagaccgctctccttatcggtgaaaagtgcgcagtcttggttgcggaggaccttggctattctggggccgatctggatatgaagatccctacttaccatgctccagcagaattctccaatctttctcgcctttgagtttcttttttgacgtgaaccgaagaacatgttctaggatatttcattctattcggcgagaagaagttccgtcctcattgtcaaattgaattaacatagtcatttcactgaacagttaatctgaaaataaagaaccaggtaaaccgacttatattagctaaacgtcatagaggaattcagaaacgagaggaagtggagatagacagttgaagggaagatggcatttgtgatgtgtatgtatgccttcggccgctagtgttggtgcctcagtttagtctagaccaggtaactagccgtcttacagtactcataccataccatcccacggctaacaactgttagttgactatggacatcttccaaggttatgtagttactagcccccgactccctactaggaagttagtaggaactatgtaccagtactaatctagtgatagctgactggtaaacaaaactttattttcctaggccaagtacaatatatgactgttcataagttttaacagcccctagccccacacccctgatttatataatattctgcctatctaaaacaccataatagtacagagtaagtaggggtgacggcgaaaagaccacgattgtgcgtggtcttttgaggggaaatcgtggtcctttcacccagcgctcgcgttagagcattgaatataatactagccaagttaggcttagcgcccttataggagtaagtatttatcatatatcaacgccccaaatcaaaagcggtaaggcgtgggcggcaaggcagataattaaatcggtgaatgccaagacggcaaaacaatcggccgcatgacaggcgaaggggcgcttcatctccaatctcgagctcccctgcagctgacaatccggaaaaaggagaccagcagtctgatatgttccgagtcttgcggcgattgggagtcccttcgccaatcattcagcattgtcgatttcgttgcccatctcgaccattatccgagatgggaaacaagaacagcgcaccttcgccacatacctggctcgacagcacatccccaggaacagatttgcaagaactgactcgtcgttagtagcttacactcaccggaattgactaacaagttagtatgtcactgactttgtattgtaggacatgatccgcattcgtattccggtggaagatggctcaatcgggacgagctcgagcgaaactctcgccacgttatgtttgacttctcagcgctgtgtgagcgggctgttcacacatgtctaggagccactagagttgtcaagtatgagaagcgagaaggtggattcaacaaagtcttccttttaacaatggacaatggaccttgtgttgtggcaagggtacctaccggtattgctggcccgccaaggttaacgaccaactctgaagttgcaacgataacttattgtaaggctaagccgcatctcctttcattaagggtatggctgatatgcttacgaatttatgtctgtatagtacaatccaagatgtcgcttccgataccgaaaattctcgactggaatgataatccttctaatccaactggaactgaatatactatctaggagtatgtggcgggtgttcaattatatcaacagtggcacaaaatgaacccggaacaacatatgctatgcaccaaagcactttcattaacaatgaaaaagatggcttccatagacttcccggcctatggaagtctatactttgcagatgcgccgctagactcggactcaaagattccctttgagcagggcttctgtgtgggaccacattgcagtccggttttctggaaccgaaatccgggggaacatgaactctaccgtggcccaagccccaattgcggaccttggagagatctcacaagttattgtcgaggtttgatagataccggtttttctcgtttgcccaaagaagccgtcaatgatcgcaagcttctgccatatcaaggatcaattgaagatcacatccatatattgaaaacaagtcgagaggtgatacaaaagttgattgaagataaacgcattcaggacgctgctacaccagctctccttcacccggattttcacaagaggaatatctacgtctctgccgaagaaccaaccgttattactggcctgatagattggcaatcaaccagcattgagcccgcgtttatttatgccaatgagatacctgatttcgctgcactcccaaggatacccgaggaagatcgactcgagaatgaacaaaatgaaacggaaatttctggacaaaaggaacgagaattaaaagatgcatccgtctgttatcagacatatgatgtggtcatgacagcccttgttcctaagctccgtcctgcaagattacttgatccgactctttttcgactcttccactactgtcacacaacttggagagactccgctgtcgctgtccgccaagagttaattgagctttcagctcgctgggtggaacttgggctagagggctcgtgtccatattctcccacagaagcggaattgaagcagcatgctcaagactatgaagattttgaggctgttcaagcactcaagtcatggctaagagacaaccttgatacaaattctgacgggtggatcccgaatgatgtatgggacactgcgagggttgctcatcgcacagcgtatgatgaatggatacagactgccaaagaagccgagtcgcgtggcgaagatatgacagtagcaaaggcggacaagatgtggccatttgatgctagatagaaaccaggggaaggcaatcaaaaagtcagctcactgtctctagtgcctagtctaaacccagtccagcccttacgttagtttttttacgttaggatatgacggcctgatgtttgtttctgtctggcgaggcattttttaagcaaatctcgccagttcctaggagtaagcagactgtccctgggacgagcatgagtattttccgcgggactgtccagtaagtctcttcgccagatcggaaacggcaaaactaactcgaaaagacaattcatagtccttaatttatttacattgtggtttggtgcaagagaaaacgagggagtggtctaagttcgattaggatggcatttcttacgtggcatccgccaaagaacgcctctgtttcttgagcgtcgtgctccagtacacctgtatggaccctttactcctcccggcgaatttctgtgcaaactgtctcgtgacctccgaccaagcaagattctgttccaagaattagtcttggcacatcatcaatacattgtgttccctccaaaaaggccttggtatcttacccggttgacaggccttacacctgcataacgtatacctttacattacccattgttctataactcgagacaaaggatgatacacagaagagtggactaatataaagatatactacctctatctccagtctatatgacctattcctatttcttcttctttttttctgtctagtcctctatactaatcgattgtaaagttaataattttagtcataaggcatccagtcaattgagctctactaaccagtcattccataactaatagattaataatagaccagccggctaatatatccgtaaggcagaggcatagttcagcgtagtagaccaaaggcaaaaataccttatatcgagtatattcggcgattctatatatagaaaaggggataggcgaggcaaagctacatacagagcgctcgagaggtcgaacgagggcaaaggactagtcatttcgtgccggtaaccgagggggcggtagggctcggcgagctagatcaatagcaaaaatgccttactggcaggacgcatataggatgcagatagcaggaaagggaccgtaacgggcgaaacgttcagcgagtaacagtcggggcgatgaaggcaactttatagaaacacgcacggcgatatcagtcatgtggaaggagctagacccaaagaggcacgctaaaccgaaattggtaattcgccgtcaccgcagagtacggcgtataccagcctggtgtgtggcggtatagaatgtataggaaggcggtatataggtggggctttagggactgttaaaaactcatgaacagtcactgtactcctacatctgcagatgtatcaaaaatacatggattaaactctaatgcgtcaggtcagtacggagtacttgtaccagaatctattgtcggggttcttatttcttaacaacaaccatgtctgcccatctccgcgagatctctgaaaattccgtggcttcccacgacacagagttgtctgaagatgctcgtctagcgagagccacagaagaaatgttagcagtcacagatgctgcaacacaagatcaagacatacttcgacggaccctgagcgtgcattctgtcatatcaagctctctaagcttcgcagagcgtatgcagcgggcgaaatggtttcagagtgctgcgctagttgtgatcgggcgaggaacatgcggcacggtctttgagattcccggaacaaaatctgcatacaaaaaaggcagcgataagcactcgttgtggaacgacgcaaatctgaccaacattgcctgccgtgcagtaacagagaccaagacttctcttcaggaaatattcccgaatgtctcgattcctcgtgtgcctgaggtgactgggtggatcagtcagaatgacttggagaactggtggctacagaatttgtcacgatttccagatgatactcaaactggatatattttccaagtccagcggatcctgccgcttcccaagccctcccgtgaagctctcattcgcctctattttccgaagaaattgcgccgttctgcataccaagacccggataataaggcatgtcttgttcgaccataccttgggcagcgaagaggagagtgggaattttctagtccagtactcagccttcagaactttcctctttatctcgatcagatagaggaactccagttagaagctactcaattctctgaagagatggctgttgggctggctattatccactggagggctttcttagacggtatggacatggaattcgtactcggtagtgcgacagcagatggagaacttcccaccgttgttgagaacttcaagacggtgaaaccctttgagacccctgctggtgatttcaaaagacggcaggtgcatctatggatgcttgacttcgataaagctgaccagcttaacctaaaggagagctggaagtcttgctgcgataagatggtcacagctgtgacagcgaatgacccctatttccccaacccagcagccacgggaactctcgaacacaagttgtgggatacatttgaacacgcttatcttcttgctgcgtctaatcttctgcatatacagagagggttgccaaagaaggcgaataaatacccagctttatttttgaaagcatgggagaagaaagctacagaactggcaaaggacacagagggtaattttgtcgaatttgggtaaaatcgggttttatgaatgacgccttttgctgcagcccacttcgggctgtctttattctgaaactggttgatctcggctgtttcgccacaatttcactgtgattagcgcgctttttcctgacaaccgagatgattggaacttcacttatattttacacagaatggtcggaagccgtcaagcctcctgttggggtagatacccctatggaccaattctacgcacgagagcacgttaacccggccagcattgactttctgtttgaaacagtacctattgatatccatatgacgaagctttgtatatattaatgctccttcttttattaatagatcaacggtctgctggttatctgagcgttcttggagtgcccggcgttggggaattgattcgaagcgtcgaatcgctccacctacttccaagcagtgaatagcatgattgtatcactgcttagcttatatgcatgtcggtttacacattttgtatctctacccgatatggtgaaaagtagtgacgacggagtgcgcacaaacgcaaagtagtctccgtacaacaacactgcgatggaatttattttcctttacagcacacctgtttatattctgcggcttatacttgcttccgaatattaactttaatcattcatgtcttctctattgggagcacgctgttagctgccagcaaccctaccacggcgcttgcccagtctatatccaaatcaaacgtctctaaccaaactgggacgcgtttcttgaaaaacccggcatggatgttaatctagctaggttttctaggccatctatgaaatctcttccaaatcgacaatagaagtatcctgatcccttgatccacgtcgcactggtactagctcgaccccccatgcaatccgtgcacaagcagttacaaacttcggtacaatacctcctagattgaccatctgctcaattccttgccgcccaccatttatttgagcatgttagtcaaagcagattactgtccgatatgtcaatctgacggggtggctacaatgtgttcgtggattcggtacgtcatctcgatgtcattttatgccaacttctgttctgttattttgccaaatataaaaggtcggggggtttgcaagtttccatttcgatgatttatgatagtctcggttcctaaccagcctatatcctgtcacaatgccttctaagaaagttctcattgtcctcagtgacgcgcactctttccctctgaaaaagacccgcggacacgatgctggcaaggttgtcgagcagccttcgggctttttcctccaagagctcacaaagccgttacacaaaatactcgacgcaggccatgaggtgacattcgcttcaccgaaaggtcatgaacccgccccagacccaaacagcgaaacgctcattgcaaatgccggcaacttctatgaacgtcaacgcgcaaacgatcttcttgaacgcatgaaacgcgagaatgggttcagtaggccgcgaccattcagtactatcagtaacagtgagttggccaccttcgcggctgtcttcatcccaggcggacacgcaccgcttgaagatctgggagaggatgcagaactgggacgaattctgcgttatttccatcaggagaacaagccaacggctgtgatttgtcatgggccttacgccttgttgagtacgaagaaggcgggagatgggtcatttgtttatgatgggtacaaaattacgtcgtggagcgatgtggaagagaatattatggagacattatggggtggggaggtcgagaaggttgaatcggcattgaggaatgaaggtgcagtcatggtggagggtgtacatgaaataaccggcggtaccacgttggatcgagagctggtgtctgcaggtaatcctttggcggccaatgcccttggtgatcggtttgtgcgaatgatcagtgtataatatcttgttttccatctggcttgggtttggctcattatcttggggctataatcaagttttatggctagcgtaagtgtaagcttggtacaattccttggaaacaaatccgggaggctacaatgatgtaacaattaaagcacacctgagctcatatactgctctagttcaccaaattcaactttcctttcattcatacttccaatatacctcgttttaagtattacttacctgtatccttatctttggaccttgagtatgaactacatccgccattcatttccatatgcagcaatgagacagcatatccgcccatctgtgggacttcgatcacctgggccggctttcagtcgaagatgtttcgccagcgaaaagccgagtggccaggcaaaaaacccccggtggttagtctccattttaacatatgctacattaattgcatctgacttacacttcatcgctctcaataggctactggtatcaattggtctcgggctaccaatatcaatctacctgtggcagagaggtgatacaaagaagcctagcagcaagcctcatacacaaccacgtggagcaaaccaagagtatagtcaggaatcagaggccacccaggctggagtacagaatatcaaatcgggatcttctggtggtgatgtggtttgttattccttctcttattgtgttgtcagggcctggttcgcgttatcatcatttaacgatccagggtattgggagaatgcatatctaactttcacatagcctcgaggcatgggtgcgcccaatggccccggaagcatatcagccaagcaggaaggcctctctaatgcggataccatgaacccatatgtgaacgaaccaggtaagagtaaaaagggcgagggtgagacagacagtgtgaaagcaaaagggaccattaggccgggtagacctcaggtgtagtctgcgctaaaacctatcgtcaccggtcttgaaatttaatatgcgcgctatatgtattgctttatgattttgttaggttacctcgcatcgcagagctatggaacaaaagtgggcgaagttgagccgttcttgaagatctctatcagtgatttccttttgccgttagactatcttcagggctccctacctatcaaatcatgagctagtagagcgaatgactctaagcggggcaccagtcaggcggggtacaaaagtcagcaatttttcgcccaacgcggtttacttcacttctcccactttccaaatattatcgctgaaacaacaaattacttcgatcaaggtaggctagggctgtgttttgtttgcatctctcgtggggaccttggtggttgctgactccccgtcagatctacttcatcaagtcatcaacaatgaacggacacgctgcctgccccaagtgcggtgtcgccgctgacggcactggaaagagctgtggcgcctgcggtgctgtatgttgattctgcactactgctgtgcgagcttatactaacccatattagacctgccctgtttaaagcatccctcgggtgtggatgaacagtatcggagttgagactgtttgtggcttagcgatggcataggaggagccagggcatgacttggatatcaatatgttcatagaaatgatatgatgacaacgataatgaactcaatatatccgaaaccaagtacgattgttatgtacgaaaacaatagaaacaacgtgaagacattcccctggaatgaaagaaatgtaagactgttcccagccgagaaacaaccatcaggatatagggtgcgtaataagaatacctccttgtctcgttcctcctaagccaacagccaggcctgggactccaaaatcaccatcactccagtagagggtcaccaacatcccacttcatcacggaccaactatacaccgcttagacaggtccagcggttttgcgccactgggaccaaacaccgatcaaactgctgacggtacctgcgataccgacgatgccatcgtcgaggttaacgataccaacggcagacaagggcgcagccagatcgcaaacatcggagatgagctgtatccgagcagcagagcgctccctaatcagattcttagcatgccatccatttttcattctgggaataagaaacccatacttctcaatcttcttagcctcaacaacaccctcgccctccttgcggtcaatagtcttctccttcgcctggagacggatgagagtgtagacaccagccacaacactgaaagccagcccagtgccccaagagcggtaggcggattgctgcacccgcttaacggaaggcagcttccgaatgccaaccacgtcgatgactgtgatggcgtcgagagtcaggtagctggcataaccgagctggcgaccgatggccaggtagcgcaggaccgggtcgacggggttcttgttatcgaaagcgacggcggcagccttgagatgctcgaggaatttgccgagacgcataatcttgcgagtcgtgccgaactgcttcttcacggcattgtaggggtcgatcgcggactgcggcttgtttgtccggtataggtaccacgcatagaagcgggagaagtattgaattgtgcggagaagcttgtcgcggccggctacatgttgcatggattattagcttgagtggtcgggtgaggacggggagagctcagctgagcttctcggccgaatgctcgccacatggggtttttgctgcagccgtaatgcaaagtgggcgtcttttctttcgtgcacagatagaggcaagggatgttgctttttggactctggggatgtatcacgtaccggttgtcgcgacgaagcgtagccagtgcgccagcgcagggtggtagatgagagtgttagcgaccattttgtctgttgccaatgagaatgaagacaatgcaacttcgaacacctgaggatgaagatgtcaagaatcaaatgtgatagttcacaagggaaaagggagtcggtaattgaccggcgtctggggccggaagaccgacctcggctgatctcgtgtgtgtgggggaagatccggaggtaggatgtaatgtatttactattaatacgacattcatggcattttagcccctacttatcatgcaattctttgaaataccttgaaattcttcggtatttttcacatgagcctgcgtcatcccattctcccgacattcatctttatcttttatgctgaagacgaccttcggaccttatatacaaatccaaactacttccaattgcatccgggcacaatcttagccctttcagaatatatccctttagcattgtaatcttaacgatagttgtagttgttgtcagcattactctatcgccaaagggagagtggaaggggctatttgctacatccctggtttgagagacgacaggcatccaagatcggagtaatattggaaggggaccgtgcagtaaagctagagtaagtccggggtaaaacgccagaacacaaagagcaatgtcccaagtaccttcacatgttgcaagtcttcgggaatacacgaggataccaggaagcaacagtatcaaaatggctgcgactgttttacagtttaggatccggaccacggtagcagaaaaagaaaacgaagactggtacatagtggagccgttttatttgtgggtaatatcgaagtccccaacttgaattagattgtttgtcaaacaagtcaggagttcggcttctgtcttgcgaaatgcatcactggcagatcagaaaggatattccctcgttgctctcatacattcatgggtcgtgtcgcaagggcaaggggtgggtgggatatttcaagtcgcaagggccgggtagtcgctgtctcgtcaatggtatctcgtttactggttgtgcgatgccgcgtatggatggagtgtgtgggattaagtagggctggttgaaacacaacagcccaaaagggtgagcaggtatgtgttgggcgcggtagggctcggattactgttgttcgcgggtgtcggtctggcggttatggttgcccatttccgtggtatcgtagccattagcctcgagatagtcgcggaacctggcatcctctaaagtaatggtgtcctgagaaaaggtgagcatataaacaaggtactctatctgcaacagttcatacctggttaatctgcggcatcatgaaaagggccataaaagcggccaagatacacagtgagctggaaacgaagaacgggtcctggcctgcgcgggtcgcattgggtgcgttcttttgtataactggaatcacgtaggtgcccacaaaagccccgaccttcccgatagcagcagcatatgaatagtactggccacggatagcagtcgcgctggtcttggcggcgcagagaccgatgttgtccccgggtcccatttcaccgagagcagagaagattctggtttcaaagtattagcattggcaatcgctaacgtctaacaactctgttagtaaacttacccgaatacgacaacaaaggctgccacgttttctggggttgcaagccacttgtagcatccggccatgatgaacccaatgataccctggagcccaaccccaagggcaagggtgtagcgaggaccaatccagtcactcacgaaggctccaagggcggaacctggaatgtagaaagaattgaccacggtagtccaaccgaagctcttccacaagggagccttgtcacctaagatgatctgtagccaggctgaagaatagataccaaagctgtaggaagagaagtcgtagaggaaccagataatagaaacaacggcctatacatccaatcagttagttggttgaagtctgcaaaggcaacacgtcggtgggggttgttaccaagcgcttccaatagaatctaaacccgttagtcaacgagtccaagcagtggaaaatgttgtactcacttaataatcagcaaggtcggaaacttgtgcatgcgctcccggttgaattcctcgggctcattcatcttcagccgaaggtacatcaaactcagaggggggattactcccagccccagtgccacacgccagcaagcatgcagatgcttctcggtgaagatcaggacgagaatcatagacaccaaagcagcaaccacgaaaccgaaatcaatctgaaagttggtgaacatgataaaccagcgattgcgatggccgctcttgagctctccggtgttctctgcggcgccgactgacccagcagggtattctccgccaatgccaattcccaggaagaaacggtaggccgtcaaagcagcaagcatgccacccaggctgccgccagctccataggagccagcaccgagagctgcaaagacaaagaggataatggtggagatcatcaaagaccacttgcgtgaccagtgatcactagtgtatccgaatatcagcatacccaccacagtgccggcaaaaacaatggaagagacattctgttgggccgtcgatttggtgtattcatccccgtaaatctgttgcagcatagtaccgacgggaccaatgacctagatccaagtgtgtcagtaaagagcgagtagcattgaagctgtggggctgcatccacgaggacgaaacataacatacctggttcaagtaaccgtcagagaagagaccagcaccacaggcaatagtgggccaactccgttcccagcgccctttcttcgtctcgtcaagaggcggcagctcgacaagctgctcctcgaggggaccactgcccttctcaggcatctccttggagtaggactgatcctcggccattgcaagggtgaggaatagcaatgagcactttggctgtgtttacgcggcgagcttgagcttccctggaggcaaggatagcaaatttggcacgcgcccaacgatatttactgtcacgcgatcacaataacaagagccgcgtcgatcgaggggttcttattctctcaaccgaggaagaagagattagaagcagagagaaaagagagcgacacctacctagagggtaaaaaagattgtcaatccaaaagaatattaaaaatatattaataaaaacaagaaacgggaatagcatcactctaactcgcatggggacaagtaccgggtacctatcacagagtagcagcgcgcgcgttaagccaagtatcggagacctagtgggacccggtccccgagcttgatcattctaagcatttagctttgagaatttcagaagtaatatatttgtaggccaatgatagacaccataaatatcaaggtccattccctagccaatcgtgtgtccgtctagagtgaccggtcggggtaggttgcatccaacaacatagtcggccactccgcacgttctactcaccataaggcgatgagttgatatcggtatcaaagtgaacacgcggcttcctgttcgaatcagatatgcaaaccagttagttatctcaagggtgtggatgttgatagaagagtgcattttctacggcgcacgtccgttgatagttccccgtggaattgtggctacctatttgtgtggagtagtctcacatgaaaaagtttttgaggctgggatccaatttcctaaaacagcgagagatacatgctctaacctttgtttgctcaagctcaccaagcaggcaatggagcttcgaagggtttccatgatttccatgatttctaggcataaaacggttcagccctatgttgtatatcaccaccccatatcataaatcctcgggcttgagtcttgaacgtaatacaaacacatagttaaaccatgcagttgtaattataattgccttcttctagcccaagctaagacatggaattcctagaatctccagtctgaatcttcagccgatgcgagtactataacgctgagacaagtcagatatattacaaacatatatctctctcaaaagtgaggtataagagtagaaatatttctttggcataaagggacaaatataatttgaagcctatagatgcgaccggggtctagcacaagtccaacgtagattatcttagacgttcgaagggagaacgctaaagaaggctcggcacggagaaacattccgccagctgagctcgggctacggtgatgcaccttggcttgatctcatccccagacatcaccagctgccatctttcccctgctctattgcatcgttttttaacacttgtgggaatcctgtcagcatctccagtttcccatcgtcaccatggggtctgatccacagtacatcaagttccccaacctctccatcgcccaacatgtcttcaatctctccaacccagcatgcgcgccagctgtccagcagagctcattgaagaagctccaagaggttatcttggagaacaaaatggcccccttctaccggcatctagcccatcccactgaaggcatcttaaacaactccggcgaaggcgtaacacagcacccacacaatgggggaagctcagcgaagcctctcatcacgtccaatcttcttgcgtctcgcaaaacaccgctaaagttcgatttcccttgggacgagaatctctaccagtctctactagaggataacaagaaagaactggagaccttccagaaggaggaagacgatgcggaagaggctgctggggagactgaggtacaagctgcgcgcgggaagcgagctgagttctgggctcgcgtgggagataaggtgagaattcttcgtccatgttttgctaagcttcttggttttgttggctgacactagtattttcgataggacaaagctgtcgaatcccacgaagcgctcctcgaaaagaccggattcctgggcaccaagattgatctggtaatggctatgctccgcatcggactcttcttcggcgaccttctgtttgtgaacaagaccattgaacgagcagagaccttggtggagagtggtggagactgggaccgtagaaaccgtctcaaggcatacaaagggttgcatttgctcaccattcgctcttacagccttgccgctcccctccttctcgacagtctgtctaccttcacaagctacgaactttgcagctattcttcgctagtgatttactcagtgctcgcgggatccttgtccctcaagcgtgtggatttcaaggcgaaggtagtagatgcaccagagatcaaggccattcttggctctggggaggaccagctggctgctttgagtggggaaatctcctcaggcccaggtgcccgggatgaggagatgaaggatgcaactgcgtcactacccacacccgccggtgccaagaccgctgtcaacatctcatctttctcaacgggatccggtgtgccagtagaggctgaggtacctgttgatttcgcaccgctcgcaaacctggttaccagtctctacaacggcaactaccgctcgttctttgtggcactcgcggccgttgaggatcagttcctgacacaagaccggtatctacacgagcaccgggcctggtttgttcgtgagatgcgactgcgcgcctaccagcagcttctccagagctaccgtgtcgtggcgttgagtggtatggccaacgacttcggtgtgacggtagactacttggaccggtatgcgctgcctaaatttcttcaaatatcaagtcatttgctgaccataactacagggaccttgccaaatttatttcaaacaaccgcattgcatgcaccatcgatcgtgtcaatggtatcattgagacgaatcgaccagatgacaagaacaagcaatatgctgatgtggtgaagcacggtgactccttgattaccaaaatccagaagtacggccaggctgtgcgtcttcggggaagtgagcgaagctaaagtggtacatttacaaacttggaggcattcgaagcctcacaaccacaacctatgatcaactatgtatgcccgaatagacaatcttacttgccgcatgttctcaaccccaggccccgtagactatgacatgccacccatggcatgacatccatagacgatcagtcccttgactagaagtccacggttagatccttttagatccttcaaaggttaaacccccgcactgggcacggaaaatgggtcgacatcgggcaaccatctgacctgactttccctcggagaattatcgtcgatcgatcgtgttaccatgcatgaacgtacgcggtagttctcatcatcgaccaaataaccgccgtagccacgtcttccgtgcccaggtggtctccttgactctaaatagttcaacgtccttatcgtgatccgccggatgtggagaaatgctgactcacaggttcaccgccaaatggccaaggccattttttcctcccttcttctcccgatcgcaatcggacaatcacgacaggggttcgtgctaaagggacttttttaattgaccaatctaatccttgattgacgattcgtcgaaatgtcctggcaatataagctcgcatccagcgtgcgggcctttccgctacgggcacagactagccggccgcataatggcctcctatatcgcccggccgcacgtgccgctgtggggggtgtctctgccagttcaggtacgttggatcccgagatggagtttccggcaatccttcggtattgacccgttgttctgcggtataattactcgttttgaccgtatccgattctgtctccgcggcctttatatacttggatctcctcttagtttcggggatactagtctacttattctgaatctcactaacctccgggtcgaacagagtccatcatgactcagacagcctcatatagcgcgcagcgcaacctgtccaccccgacccctaagtgcctgaacgtcgataacatcaaccagaacgttagggatgctaagtacgccgtgcgcggtgaattggccgtcaaggctgagacctaccgtcagcgtctgattgatggcgacaagtccctgccatttgacagcgtcatcttcgccaacatcggaaaccctcagcagctcgatcaggtgcccatcaccttcttccgccaggtcctcagtctcgtcgagaacccattgttgttggagaacgccgaggtcctcaagaagtcatttggatataagcaggatgtgatcgaccgagcccaggttcttttggccaatgtgcagagcgttggcgcctacagccacagccagggtgccgcggggatccgggatagcgtcgccaagttcattgagaaacgtgatggtttccctgcaaacccccaggacctgtttttgacttcgggcgcctcgtccggtgtgaacaccatcttaaacgtcatctgcaacactcctagtaccggtatcctggtccccatccctcaataccctctttacaccgcaaccttgacgctgttgaatgcccgctgcgttccttacctcctcgacgaggagaaggcatggggtactgacgtcaacacgatcctcaagtccattgaggacgccaaggccgccaagaccgatgtgcgtgccgttgtcgtgatcaacccgggcaacccaactggtgcctctctgagcgctgaggacatcaagaatgtccttgatgtcgctgccgaggagagcttggtggtcatcgctgatgaggtgtaccaaaccaacgttttcaagggtgagtttatctccttcaagaagcgactgcgcgagctccagcaggagcagcccggcaaatacgacaacatcgagctggtctcgttgcacagtatctccaagggtatggtgggtgagtgtggccaccgcggtggctacttcgagcttgctggcttcgaccccttggtccaggagcagatctacaagctggtcagcattggcctgtgcccaccggtcaccgcacagtgccttctcgaatgcatggtcaaccctcccatcgagggtgatccaagcttcgagctctaccagcaggagtacaccgatatctcagaaggtctgcgcaagcgtgccttttccttgtacaacgccttccagcgcatggagggcgtccacctccaggagcctcaggtacgtattctagagttattcaattttttacgcatttcctaatcgtctcgacagggtgccatgtacctcttcccatctattcacctgcccgcaaaggccatcgaagccgccaaagccgagggccgtcccgctgatgagttctactgcttggccctgcttgacgccacgggtgtttgcgtcgtccctggctcgggcttcggccagaaggagaacactttccacttccgcacgaccttccttgcccctggcaccgactgggttgagcgcatcgtcaagttccacgccgagttcatggacaagtaccgatgaacatgtactaatgtacaaaaagccatgtaaatttgaaatgcccatccatcgagatcttcgagcgattggctggcaccatatattactctttgttcgtggttcttttcacgtctatacgaaatgggtttttggcatccatacatgtgtggcctctacgacgcaatgttttgaatatttgaatttggatatggatctggaatcggctcgcccccgatacctcatagactactgactccattgggcttgctattttccatactcgtttttgggtactctttctggcgtctgtgcatcgcattttgaatagtggtatacatttcccttgggggacatttgcatcgttcgctctatttgatatgggtactgcatatcgtgggttacgttttacagaaacgtattctgaaaattgattcattgattcataacaagttcttgtatctttcctggtcctgatttctagttggctaagagataactagacgaatgagagaagagtattagaaaaaagaattgtggcaggaagtgtcgaattccattttgttgataatgcaattatcaggttcagcaaatattaccgttcactctccgagtccaaaagagcaaagcaaagcatggtggtcgctccagagtgttacttcgggctgagtctgctgggactcgaggatatccgtgtcactttgagtgtgctcttgtccatccaactcgcccacttgttgagcctcgagtatctcaattttacgtgctttgagaccgagcagcgcgactttgtccatccgatttggcggaaatcgctgcttcccatccgctccccatgtgtaacctggttccccaggacgaagagctgtccaggcatctgtaagaccattggtctccacgaggacggcatcttcatccagaaccgggttgaagtcaccagcaaccagcccacggcctgcactacgcaaaaaagaggaaacaatagcgagttgccggggccggtgggaaggtttgatagccagagaatccagatggacgtttgcaaatcgtacccgggtagtagaagaagcgtctgtaggtgaagggacgaacagatcacaaaatagtgcatctcttccaaagtggctagggaacgccaccctccaaacaggccctagagcaaacctgctcgtctccgagccgtgtcgcgatccaaagcgcgtcttggataccaaggtcattgtcgtgaacgagtttctgcatggggtgttctcgtgcgcgcttgagaaccacgatccgcgaatgcgctcatcgctcaaaatcagtcgcaagccccgctgcgaaacttcttggagaaatatgatgtccactttggattccaggtgagtaatgaatgtgagaatttctgtgacgcgttcttgtgtcccatcggataatgcgtcaatattccaggtcaagagcaccatatcggatgatgtatcctcggcgcgctgtgactctgcatcttcatttgcatccactggatcccactgctgggagttgggatcgaactggtgccaggactggaattttggatctggcacgtcggctgggaggggtgtgtcatttttccaggacattatgcttgacctaacacgtacgtaaatatccatggtgagaatgaggctgactgtctaggtactcccgagggtgccttgaggttcaccttggaaggtgtggtcagtcttatgattagttaatggcgtctaactacgttgtgcctgaaaaggggaaaacaactagtgtatattcgactaagatgtgatggacaagagggagagagagaggaagagggagcggaactatctgatgatctgaacccacatgggtgaccgccttccggtcacccaacattagttaagcattaagcctcaggctgaccaggagtgacgtgtgtctacatggatgttgtaatataaccacatgtatgtatagattaatgatgattttcatgatgttggaatccctaatggcacagtggtctaacctaattaggacagatcaatcttaagtcggcccatgcgcggaggtctcctcgggatgtgatgtattgacgtcgaacatgcggatccgggccaggtggacggcaactggaatacgtcagtcgatattggttactccgcacgcgttccctgactctagtattgacagcaagagcattcttggggtatccgaaatacacgtgacataggactaacacatgctccctccgaactcccatcgttgtttaaacagtccatccattagctggccgttgcaggggtcgtaacacgcgggctatactagaagatacatgaactctcaaacatatacatctttcaggccaagaatatctgaagcttatttctttttgaacggcctaacgtatggttccataatttcgtgagtagctagtgaagtgatgtagcgggttgtacaaggggtatttctagtctacatgtctctctgaatgaggtcataaggaaacgcactacagtcggtcttatctaatgctctgttatgcctggccatctggattgcgccctgtacatgtatcttagtcgaagggccatcaccaaccaggatctatgatttgttagcggtatgttaggtaaaccaagagatgcagtcataattacctcgtcatgtgctaggaataggggtaacgcaagggtcgaatcactaatcggagagtgtatctctgaagatgatatagcctcccttagtgaccgcacacacgcgattttgtactgaagggcaagttgaacaaagtatggcccattatgtggtagatattgtgatagatggcgacatgacacaagaaagagaccattcaaagagctagcattggtagcagcaagttgcacgaagtgtttgtttaggtgctgtgtacagctttccggatggctaatctggctacgttgcgaagttgaacacggtacaacatttgccatgtctgcgctaggttagtcatcataatctgcttcttagaaggtccgtgagaagtagcggacttgcgagatacatcgacttcttctgacgtgataaagccctacttacagtagtctaagagaaaatcttcattcgaatttaggctcctggcaaaacttgcgaagggatctctccggtgagaccccaggaagcccagagggcttgtgatgacggatatcgctatctcggcggccgctgtggagaatggcaggctttcgtcttccgagccactgatagttttgattgcatggtactcaatgactctctgtcgcctcgtcttggcatgtgccgatcgggctgcatgtgagtgaactcgtcgtcgcatttcagccgacgctacctcaggtactccgggtttggatgaatggatgaactggatttcacttcttgtgcgggacattgtggtcgtggttcagcgtctgaacgagagccactatgaattccaccatgagttgatgagatgcaaaagcgtgtaaaccttaaagccatgaccggacgttgcaggacgaacctcggagctgaaccaacgtggaggtatgcgtcatttgtcagcaatgaaggaccttgccaagacttgctccttcccgataaggaatagtgccacgtgcccactctactagcgtgccttattcctacatcgatcatcgctcatagcacaaacaatctcattgatagattgaccttttccttgttagtaaatcacctaccagaacttcttacacttgcctataagtagatatgcaagctttgtaagcactgaatgaccttgccaagacttgctctttccagataaggcatcccccactacttgccgttgcttcgaagccaggaaatgtccgtagcaacagccaaggagaaaaattgcattcgttctaatctcaaacaacttctacggaagcaagcgggtaatgaatagcttagcaatcaatcattcaaggtacttatataaagaagtgaccagccgcatagaggggtgaccatcttcaagagagtctccctattcactgctccgctgcatatccagtattcattatggtctctcctcctatgaaaagttttgtgtcattcaccaagacttggcacaatgatacttacccggccatctcacccacacgcccggagctttcgatggctgggaaaaacgttgtaatcacgggtggaggcacaggaattggaaaggcggccgccatcgccttcgcccaggccggtgccaaatcagtttccattatcgggcgcaggatcgaccgtctctacactgcagggcaggcgatcactgaagctaacccctcgactcaggtcgtcatgcagacaggcgacatcaccgacctcgcttctgtcaatgcagctttgggtgcgattgtgaaaaaggtcggcagcaacattgacatattcgtcagtaacgctggtatgcttccgaaagagggcccggtaattggctacccagaggctgaactccggcgcactttcgagatcaacaccatgggcactttccacgccttgaatgcgtttaccccattggccgcccctggcgcaaagttcttgtacacggcatcttctatcagtcactgggctcctctcccggaagtgccaggagtatggagctacgcggccacgaagggagcggcgctgaagatggtcgactactatgcttccgagcacccggacattcacgtcgcgagcttccatccaggcatcgttggcactgagatcaacccgaacatccccgtagggccagacacgggtgagtacctttgttttccaagccatcaggaagacagatggactgcagagtcatgctaacacaccttgcagtggagttgcctggacactttgttgtgtggcttgcgtcggatgaagctgcatttttgaggaacaagttgacctgggcaaactgggatgtggatgaactcataggtcgggcggaggagatccggacatcattcctgctaagggtctctctgaatggtgtgaacatgtagttgaagttctgttgtctgacgagttcgagagatgtgcaaccaagttcatagccacaaattttgataaaggaggcgatgttgattggttctcatcgacagaaatctgattctagtcctcggagttcaaaaaccaattcttcatgtgtatgggacaaggctttcaataaagctgacaggaacaatcgttagttaaagttaaggtaagggccggcaacaagactggaggatgactaaacagtgctgggcgggtgcagaataagtagtagtggtgttacaggttaagggctgctagacgactagcttatgctcatagtagtaactacaacaattacgatgagctccgatggtaggcaagatatatatacacggacccactacaaccctaaaaggagaataccagacaacgaggtaacagactaagactcatgacagaagtaattgatgacgacctgatgtgcaactaacaataaggcaaacttgtttactttattaaagaatatgcacggtcaggtgttctattgcttggtaaatgcttagcaactaagaccgagcttgaatggtctagtgataaactagtactagtcagctgcatctgatctcaacaaagggattgtcattgaacgcaatagtatacagattatacctcaatctgacatgtaactatgttgtactgtgacacaatacaaagaagcggtaagcattcgaagacaaaaaaacatactccgtacataccgggtaatgtctagcaactcctagctttccctttccgtttcaatgctcaccccttgccgctttttgatcactaagtagaattgagcacgcccctgagcagcctgacttgttcagtgagtattacataatcatataactattccacgaactgctgagaggttaagtaatacccacctcaataaaatgcaacagtataatggggctagtagttgaaacactcctaggagcacagagcctgaattggaaattgattgaccgaatataagtatcctttggcgtggttactgccttggcagaagccagatagccacgatggtcacatcgatgatgtccgtcctttgttgatggagcaaactgtgcatggcagccaaaccatcgtcccactttctgaggctgtctaacagtcggttacaaagccactctggggctatattgaagatgacgaccagaaatgggaacgtctggaaccagacaaatatcatttgaatggctcggatagcctcttggtatctggcaaaaaaagtccggtttgtcgagctgattccaacatctactgtagctataatccgtgataatatcaacagtcagggcgcgaaaggactccccctggtggctgtacaaggaatactggatcatgctgcacatcttatcggccttagcccagatgactttcttaaggctggggatagaccagcgtgagaagaaggggcttagagcggctcgacgggtcttatgaatatcgttatcaatgacattaaggaggataggagtcttgagagccgtgtcaatgggactatagtaaccaggctcctaaagaagcttgctaccaacgctgtaaatcctcccgtagttctctggaaagctaaagtggacctcattgggagggattggataacataagagcataagagcatggatgagatttccttccttacagtattggtgatagggaattgggagactggagagaccccagaggaatggaccggggatcttggctagtggatggaagtactggcaactgagacatggtcagcagacaaagcggccatagagctagtagcctgatactagagcccatagctcctgtaaacgattattgtggtggaatattacaggcccaggcagttgcaggtgggaactttcactctctatcgcttccaaagtctaggccagccatgcattaaaaggctaaatggcttgggctgggctcgcgacttgtccactcgcacttaaatgctgttaacgccgacattgcctgtaataatgccgggcgttgtgtctagaagaccgaagcagtggagagataccggtcatgggagcggattaattcatcgccgaaatgtctccgcggaccaagacccactctagtacccactccacggggcaagacccgctccgcggacgagccaccgatgatcttccgtgccctacctcgacgctttaaatagcagttggtgtgctgggttcattaaaagcacttcgctacaatatactatacacatatttgcccaatccgttgtatccttcaataatgcactcccgagacgcaaaattttcggaaaaagacattccagatttgagtggatatgtcgtgattgttactggaggtgagttctctctatattgtgttgtctgggaggccacacggtgaatactcactgaccttcattcagggaattctgggatcgggtatgaaactgcgcagcagcttgctatcaagaatgcgcgcgtttacattgcgggccgctcccaagagcgagttcaagaggctatccggcagatgtcgcagtcaaatgtaacgaagcagctagatctccgttttcttcagctggacctgcaagacttgaaatctgtcagggcagccgcactacgtttcatgacagaagagtcgcgcctagacattctgatcaacaacgctggcgtaggtggtctcctttcaagaaagccacggaatgtcagttctgacactaactatcaatgccccatcaggtcatgacggttccatacaaacttactgttgatggattcgagacacagtggcaggttaactatctggcgcctcatgtccttacatcaaccctgatgccgcttctcttgaaaactgcatcttcttccggctcttccgaccgtgtgcgcgttgtcaatgtctcgagtgatgcagcatttttcggtccgaagacgttgttgctggacgacgtaaacatgaccgagacgaagggagtgatggaactgtggtatgtgcacacctggatgaatgaacccatgctctgttactaaatcctagaaggcaacggtatgggcactctaagcaagcgagtatccgggatgcgaaagagttgaacgatcgttacggttctcagggtaggttaccatcgacttgaggaacaactcccatgctgaacaatatacaggggttaccgcatactcgcttcatccgggtattgtccgatcgaatcttcaacggcatgatccgaccgtcattggcagcgtcgtgcgaactcttatgaaatttgcagctggtagcaccccgctagaaggggcgttgaattctcttttctgcgccaccagtccgaaggcgccgattatgggacaaggtcagtatttcgttccggtgggtaaattggactcccgagcagcaaattggatcaatgattcgaagaccaacaaaaagctttggcaacaaagtgaggatctgatcaagcgcttggtgtgacagtgggccactagtgcttaggtactcatctgagtttcatttgtcacgggggcatactaggatatagtatttttagtcattaattcaagttgcattactggtacgaacatgctaggttacggcccgtagtttctgccagcatcatcagctcaattccgcctatgaatcaggaaaggtgataaagttgggcgcacaccgcaacttcacttacattgaatcttacggcatggctggccaaatgtctccttgttcgtcaatgactagtgattcactcctcataggttgttccaggattcacgaaagttgagaatctgacgcggtacgagagcgttgaagaaacgtctcccagaggccctaataaatgcggagggtggtaagtgcaactggagcttgtagagcaaaatgggactcttagcaaaggagaatatcaagacgtacccaatcgacattattaggagtagcgagcattgcttctatcccttccagatatgagttttgcggcgagatttctactagaaggagggctgtgagacgtcatgttttgtgacaaagaaatccgactacggattgccgatatagaagactcaacgggatgaaatgggaagaacataccttcctgcaagaacgaaggatcgtacgagaagataggattttgaaggtccccaagcgattgaaagtcctcaagggaactttcctgagattcttgggatgtgcaaactctctgtagcatagctgaaataagatccaggccgaattgggcttcagtggaactcgctttgaattctgcccaaaattgacgggagtttttgagggcttcaatcagctcctccgagcgataattcccaagattacggtcgtatgaactggaaggcgcatagccttcggaaccacgggagccaagttcaagacagacgatcatggatgcaagtaagaagtcatgctgctcaagagaagagataaaccatttgtctcgataaagaagaccaccagggtggacttctttgaaaatgttcatctggtgtgaaaggatggacattgccgcgtcgatgcaagaggatcgcgaataactgaatttggggtcttggtaagcctttgtcatatggtgacgatgcaaaaagcaccgggctttctggaaaagcagttcaatattgtaacgccgaattagtaaatgagaaggcgttgtgacggatgcttcggacgaagtcatgcgaaaacggggtgggatggagctctgcacggcgagcaagcgtttatcaagagccatgatctcctcatatccctcgacccgaccgaggcaaacctcgttgaaaatagttcggaatacggacagaagttgagcttttgcaatcgtgtaagatacaggcgttagctcggtatggggccgcgagggtggcagtcgcatcgtgtctgcatcaaaatcttcgtcgatgaggttgtgtggaagctgagtatcacactgtgattcttgtatcatggaaggcaatccaagctgacatgaagtcaaggcatcaagttgtaaaattatcgcccagacacgacgtcgcatctcaccattgaaggtagaaatctgtgagtagtgctctgggtctcgatgatatcccatccgcatcgccagcctggtagcaatgccacaaagaacccatacgcccaagtgagcatctcgacgtcgaacatactcgttttggatgttgagcagcagcgcttccatagtgtgggctgtaggaatagtagaatatttggatatgatgagacattccgtggaacaccgttgaaaaacatccatggcattgcgcggactgcctaacccgttcggaaggtcatcttgtgatcgtacgtagaagaatacccccatggacatgataccgaaaagaagactcagccacggggcggagaagttgtggggttcaagccagaaacgggcatactgcagatagagttactttcacaggctgacgatactcataccaaaatgaaggtacctcttgtccaaaagtgggcttatgaatgatcactgcattcgcagttcgttagtaacttcaagtttagtggggaagaaattcgtaccagcagacggctcattcgaattgatgtaacgagataccagtctgtcagccacatccctcggggggatttcacatagtactgccgctagatccgagctagggtgtgtcccctcgaggagcattggccccccctcatgttggatttgacctggaaaatccaaaggttctgccgagtggtctcgatcgatatgctctctaatgcttgcaacctagatattgttactacgatgagctcctattgtaaagcctcctaggactttgacttagttctttacttcgttgcaaatcgctgcccagtgaatgccggagacatacaccacctgaccgctgtttgatatcatgtggccgggcttgacctcgatatcattcgactgtgcttggtcagatgcaacttgctcacggctttcaacggcgaaccccaattcctgaatattcgatggatcaacagcatcttgaatcggcgaccctggagcaacgcttgtaccgacaagatgctctaattggcgaatacgcgcagagagatgctggtttccatgtcttgtgtgagcagagttccggcttcgtaatacagtggcataaacgcagtcaacacctctcgtggcacaattaccgcacggctccttccgatcacatttcagtctaaccagaaattggtgagttgacttcattgacgataggccccgcacttacttccgttgccggcaagaagcgcaagagaggaatccacgagcaccttgcatagtttatagatcgagatatttaaccggactgaatcgcagggccactggagccgttgaggttccaaaggaatggagactcgcgtgggataggtcgcgtgagtgtcgtatctcgactaggtctctctaaaaacccacccacccacgcaaacggcccgttgggtcggtcttagtcagcagacccgtttgctggttgataagcgatgagtcggagttcatgtttctgaaccaggcaatcaagtagctaaatgtaggaatagcctcaggagttcattgtgtgttactgtattagatacaagtagactggtcgacagatatgtatgcacgtgatcctaggatatttaacacgtgttgtagttcagaggtatgattgtcattttgggggggaacatgcaatatatataacaatgagccaagttgatcaatcatcttgctcgtccgtatggacacctcgggaattgtttccgatgatgcggcttttaccactacaagacaataatattcagcattaaaaaccataagagccctacattgagtaaattccaagctcttggtggccgagtctgatctcagtagccgttatgtattatatagagtgagaaatactttgatccggctactatacggtctatacctacttatcgctgcggtgggcccggatcaattgaggactcaaggcccccaggccaatccttcggagttccgcgggacaacccagaaaagcagtgcagtcgtcaggcagtaggtacggagtactccgcggatgaacccaactgtacggagtactaccgactacgtcaggacgaatggatcggcctacttatcattatcgtccatggcatttgtttatatatctggactgatgtccgtagggtcaccatacgtacacatttcagctttgccaagcgaatattcactcgagctcgatgtctgaactaagcaccgcgccaactccatacttatcctcgtaacagaaaatagattatatctgagatcttgagctcgagacgctctgaattagaaaaaaagatgaaagcaatatcatgaaccggatggggttctccactccgtcctacgccttttcgtcatgacgtatctccttaataagatgtagtggtccaaacattgagggcagcagcgatactatcaacgaactaactatgtatcatagtataaacgaccttatgggggctaatcccttctgggtatagtctgcagtgggctgagcatcagtcattctacacgtgactgaactgagcatgatcactgatctgagtccgtgctgacatctactcagtgagcctgagcctgagtactcataaaagcggccgcagatcaaataggaaagccctacctggcagggaaaatccggtacgtatagtaacatacacacataccccggctgctccagtagaacctatgacctcagaagtaatccagctctatctctccagatccacaatgccttccctgttgtacatcctcaacccaaggcccacacatatgcaaggcgcataagcaaatccactcacatacacctcacgctatgttgtatgtacatattcggtaaccggctatctgtattaccgggtccaaccgattctactcgcacagcagaggtgcagcatacagtagtcacactgcagaccgcatcctcggacgaatgtcacacttaccttgccccaagccctgacttgcgtcgtcttggctaatgcttagccatggggtagcgccgatagggggtttcccggttccatgttgcacggtatgtacaaagtatattatgcaagtatgtccgtggttgcgttggatagatatatagctaggcggggagtgtacatacaaagcgtggaactgttcgtttctatttagggtagagtagtgtgatgtagtatatatgtatattgtagagaaataatttattgcttattagtgttaaatagttgtgcgatatacatagatgttgttcgactgttttagaatggcggggagagtctcggagtaagggatcgcgttacaactggatcattgggtacttagggcaagagggcaacctctagggcctaaaatactccgtatactccgtatactccgtacgacctgaccaatccacgagtcaatttgccgatgaggcagctgagtgtcactgggcgtagctcaggttttctcaccgctacatccccgctgcctggccgggatcctctttccatcgatcgttactactagtattttttgaagctgaattcacaaagtagtttatttggtattaaactatttacctagttgataggtaattggtgattagtgatatcatcggcttggggaggtatctcagctaccgtcctgtgttgccctatataataaaatatcgggtgcatacatccacaggcgaatcccagggtttgtgatccgcactgtgcatgcattgggtatcgttgtccgggggcgagtgcataaagaagaatcactcgagtcattatacatgtaagaagagaacaaatgagaaagaaattctatacaccagcgaaaagcaagcaaggagcaaaaaaaaagcgcatgtacggaagcaaaagccaaagaatgtacaagcacgtgcatgtctccaaatcgcaaacccctctagattggatggctatcaaggaaggaatctagactggctaatggaacaagacaaatcaggcatttatcatcatctctcatcatagtcatgaagacggtgtggaggtggtggtatattgccgcgagagagcaagccccgggacagaagaaccatagggggaatataatataagcaaggatcatcatcaaccactgtttcttactagacccaggattgttggaagaagttgtcgtccatgggcggggtggaactagcatcaaaaagaccgctagaccagataggaacggagtccggcggcggcggcgagggagcgctggtaatcggggccgacgtcatgggcttgtacgctggtatctgcgacatggtgtagatatcctgcgcagagacaggttttgactccacgctcatgctgacttgcagctggtgctccagcgcagcagtggactcattagtcgacttaagaaagtcatcgatgttgatcgagtccagctcgttggatgccaggagatgcgtctgaggtagaccaatcaacgaggatgcagagctgatgcggagatggtccatgtcagacgtttcgctcacgctgtgcagatcgtgcatgtcattgctagcatgacccaagcctggaagcgtcccaaactcgtcagtttccgaattgtctccggatgatgatggcggtggaagacccgaggagtacgcggtgtaatcgaagctggcatatgaaggagcttgcgtactggtggtgccaggcacgtcggagtatagagggaaacttgaccagtcgaccgagggagcaccgatgccagcagaccctaggggcatatcggaatctggcgaagtgaaggaacattctgggtaagattcttggaatgccatgcaggtgatcggagaattgctgctcgtggtcgggaaggaggcgaaagaggagacgtcaagtggaggaacactggtgacaatctgctccaggggaaatttgtccatggttgcaggggcagatatcgggttcgacagcgcatcatgggatcggtctaatgatggagcgggaggtgctggtgtaacgaagttgtcgaggtacgagtgatcgagaggggcaggtttcaaatcgtcttcggcgcccgaaagatgcgcgctgttgggagaaccatttcgcgacgtgtgttgtgaggtaggaaattcggatagggtgaaaggatccttaataaaggtcgactggcctagcggcaaatgatccaccgagcgacggggtaagtcggttgggtggtggacggaatgcgatcgcgggatcgtataaggcaatccacatttgtgagccatgtcattatgcttgtgggcaggtttatgatgaccgtcgcggaaaatcgtgagcgtcgattcagatttggtagacgtaagaggcggtttccgtggggtttcaattgtaagcgggggtggagggaaggcaagactggtttcaggcacagtatctaggtgttcttttttgagtgcacaaatgcagcgctggccatgacagcagccacagcgaccatgggaaatgccagtatggcagtcttccttcttcttcttttcgccgcaatcacactgggtgtgggttgtccgagacttgcgtaggccgcggcagtgagtacattgagagactgggcggccttttttgttgatgtgggtcaattggcggtctaaaggggggattagcatatatacacaaggttgagatagcgtcagattggcataccactatggtgacagctgctgactcggtgaccccggacgcaagcctcacaagcatacttttcaccatcgatgagcatcgctgcggtgttactgggaggtacacatgcgatgattcgcgagggataccggagaaaataaaagtttggaaataaaagagatcggttgaagagaccgaggtatcaagccgtcaaggcgattggcagcggctccttcgagagggccgggccgagtagaacaaaatgaacaaaagggtataatcgtatagtcgaaggtcccaatgcgcggtgttcacagaacgccggactagcagtgtagaatgccgctgagagccaccgcactgtcttcgattggaacagaaaacaaaaagaaatcgaaaatccaaagggtatctcaggcgcgaggtagagagagggagggggggtggtcagggatcggagagtaagagagagggagagagagggggggaccaagcctacgcaccgtttggcgccggccgttagacaggacaccaagtaccggtagtggcggccaagatgaaaagcgttcgataaaagaagacgttggacacgcaatgaggaagagaaaagaggaagggaagggaggcgggcagcagccgttaataacgggatggtatggaacgaggattttcgctgcgctactggtctttgtggggggccatactgacatgtatagagacgactggtattgtacttttacttggtttttactgcttttactgcttttcctgcgtttatttactggttttgaatgtaatggttgtacatgctgatatagaatgggctaacaggtggtaaattaactgtactattactccatatcacacaacagatgcttcttcggttctttgacctgaatccttctggactccacttacaggaaccatcgctgctaagaggttccaacgcacatcgtgagaatgaatttagtttttcttcttttaatctactagtcttgtttcctgttcctcgttctctattctcgctttttaaactttgcctttttttcacgcccaaactggcagccccaaccgggtgtatagtatgaccgaactcgtagccactacatggaatttcccttacaacatacacaaaaattggcgtctaatcttgacgaactcaccccacttagcaaaatatggacctaaatctggggccgcatacggagtatcccgactcatactctctcatacttacatatgaacattgtgtttgtgctacggtaaccctagttgctggggctgaatctattataggacataatgtttcaggggtgcgcttgagccaggtacatgaggaactttccataatccctgcaagtttccctagtttatcttttcatccatgtccttggcacacacaactagtaatggaaaatgataggaaagagaaaagcatccagtggaaggagtccacgtaggtgtgcatcaaaagttaatatcagattacgtgcgacaaataccgagtacatacaagtaccataccaaaatgcatgtcatagcgcaaaagcgggtcgatggcgtcagtgtccctgcttcgggcggcctgcagagagtttgggccctgatctgcatctttttacccgccaatcgctatcttgcggtggacactgggtttctttacgtggtattccgtatgtacaggttttgttcgtctttatccatctgtacagtacaacatattaaggttgaatcatctgatctaacatatgatgtatggagtcgaatttggttgaattgcattacgttgacctctaatcacccctttacatgattccacgtaaaaaaacggtgctctgacctcaactagcacatacaacatacatagctggttattgcccccgaaaaaaccagatccgggtaataataatagcgaatagcgagaaagtatgagatactcatactctttggtttgacatatctcaaatgaagaaatagcaactccaacttattttatggtaagcataccactattgacatcaggctggaatagcttgatttagaaaatcaactaaatcattcatcactctcaaactagttgtcgggtagatgcgaatctttctgtggccaattccatactaatatctgtctctgtccacaaagaagactcttgaatatatagggatgtagataacaacaacataggaacgtaagacccccactactcccactagttaagggtggacgagtagagtaatcaaggacttgtagcactaggttttcagaacgatgagtttatagtactatgaggaaaatcacctgactgatctcgcgcatcagatcaatatcagtgtgaacgagtccgatgacattcgacggtcttgagagcatgattgatactcactgccccctggaataaagtggcatggcatgggtgctaacatcgttttgtacgtggtagttcatccgaagccgaaggggaaatagtattaatccgttcgacacgcagaaacgaaaggccgtcctccgtgcgatcatcaaaaaagactcggggaagcaaacaactgtatatagcttcaaaataatatctaattcctttgaaacttctgtacaaatgttgttgcttaatgcggcgctctccgcgctagcccccttgaaaatcaccccccacgaaattttagttaaaacttcacttcttgcatctcgcgtcctacactatcttctctccatcccccggaggcccgctttgcccacaacccatcattttacttgaggttttcagtttcatcccacacaatgaactctcgcgagcagtctgatatgcctccggcgccttcttacccgtctcctaacggtgcgcagatggcgcagggtgtgccctcgtattatggcaaccgccaaatgaccaccgacgaactgctgtccgcagaactttcgcgtgatgcgtccggtccaggtctcggcgaaacaaacaacggtgttcatcatggccagtccatggtgttgggttcctcaaacgctgccgacatgggtcgaacctcgtcggaggatcaacaccagcatcagcacatgctccagttccccccaagtcaacaggttggcgtcgaccccaatcacgacttgagctatggcgaacagagtgcgcgcaaacgatcgaagatctcaagggcctgcgacgagtgccggcgaaagaaagtacgataataactcccccaaacgcgactgtgaaacctgaaaagctaagacgcgttttcttttacaggttcgatgcgatgcaagctcagaaaccggccttgaaacatgctccaactgcagacgcctcggcgttgtgtgccagttcagtcgcgtcccgatgaaacgcggccctagtaaagggtaggaacaacaagtgcaccactacaagaatcgccagcgctgacagagacacaggtatatcaaagaacttgccgagcgactccatactctagagaaccagatgcaaccagggatcgtgcagcctgacgtgccctaccagtccatgaacgaggtatcgctaccgagagggtaccaggatttcgcttcgccggtggaatcgacctcgggcaatcgcaagaggacttactcggtcttcgaaggtcttcccagttcctcgtttgcacaaccttctttcaacgctcgcgtatcgcaaaatgccttcgacgcgtccgagacagcggcagacccgtacaacccagccgtcgccaacggtagcgcaccgagacctggtaatctgttctggagccccacgggtcatgagaatgacctcccaagcggccttgagatgacggatttgccaaagcatgaaggtgatgatgatatgacaccggtgactttggatgaaggagctcttgatgcgtacgtgcaatgtgtaatcctcgtaattacgagaaactaacctcataccggattgcagttactatcagaagattcacaccctgctgccaattcttccccacaccaaggagcgaacgttggagcttttgcaccaatgcaatcgcgaggcacaggaaattttctgccatgcgttgtacagcgttactcgcactgacatgtctcgtgtggctggcaatttcgagaagattaatggctttgataatgctcaggatctcctcatgttccacactcgccagccattgattatccatacaacccccgtcaacctaatctggcttcaatctcttttgctgatgatcatcgactgtgacacgcgtgggccggataattttgttctcaaagatggtatacccaagggcagcctagtccaagccgctaacaagctcggatacgatttggccaagagccaaggccagctcaagaacaagcgatctgtagatcccgacgtcgactcggatgccaatctcacccggcgaaactgggtgtctttggtcatcttggcccggtggtatgctatgagtgtggcagatgctaccgttctggggggtcatgagattggcggccgtgaagatgcaagggttgttggtcaaatcacaaccggaattgcgtgtatgttgatcttccttggtttacaattttactgtttcactgacccttttcgctccagcttactcgacattcctctcggagatggtcactttggtcaatgtcgaccacaacgtctgccagactaactccggcctgggtcgtatcatcggcgcgaacctagtctcgtctctggagcgtctagcggagatggaggacatattccagatccacgagctacccgagaactctaccactcgcccactttacgaaagcctccaagcacaactttactggaccgtccgtttgctcatcaagcgtcacgtctttgtatacagcccgtacgagatcatattctgcgcgcaggaggtaatcaacgagatgcacaagtcaaccatgcaatcccgcctcccatccccctttgatcttcacagtctcgcgctcgcttcaatgactcttctcgaggcgaccattctcccagaacacgcaagcgaatgctgggctaccctcgaaaaagttgaagagatcctcgactaccgctccaagcgtgcagcaaagggttccgagttcgacaatatcttcagcaccccggaatgggatgccaagatccgcatcttccttgagtggcgccgtatcaagtcccaggagagccagctccaggaagctgagctcggcggtctcgccaagtcccagcagcctgtgatgggccccaatgagcagcgttctcttcagcaccttgctgatcttgctgtcggcgccgagggctcggttggtcagaacgcgccgtccacgcccccgccaggtatttccaatgagcatggcgaaacggagcagaatatcgctcctcagttggcccagtcgcagagcggatcgggtcgtgttgttgttgacttcactatgctcactaaggagggctacctgaacgtcttctctgggttgatctaccgtcgtacacgttgagttgtttcgcgatcaagccccgtcttctccgcttaatccttgtgtctactttttttgtctgaataaaggaggcccctcagaaatcgtttctcattatgtaatatttgcgttggctgggcttccctatggctcaggcttcgatgatatcttttatatcttatgttgtagtcgtttctcggtcaaaaagaggggatctagctcttgaatggaatatcgtttatatatgatctatatatgtatccaattccaggcgcgaggtggcttacccaaagagtttcgaaatttcgaaattaccggttcgatgcaaactcaacaaacaaggcgactgtcaattctctcctgcatctcgctgccgtttcaccacagactacgacttttaccaggggctgtctaaggctcggctgacgggaaagcctctatagtactgcgtagggttttccttatcccacctttacttacgaccacgctactattcctgttgctttgacctccccgtatagacactacctcaatgagtcaaatagctatgctaatcttgaatagttctttgctagtgtggaagtaccccacatggaggatgaaggctttgacaggccattcggatttatcgtcactggccaatatcttgctattcactatcacggcaacgacttcgagatatgcagagactaccatgcgcgtggtgctttgttctacctttccgacgacggagaaacgataattcacaatcgcacatatgtcggcgctctcactgactatcccgactatgaaggagacgtattttacatccgcaatgggtcgcggtacctagcccaggacgggcagtggacggaccacacccatgacgctatcaaagtccaaattgacccagcgggagactatggcgatgccgaacctcccattcccccgtcaatttcaaatcctgtcgttgatccgggcaatcctatttccgcggacggagtcgatctttaccaccccgataaatggttttcgttatatcccattaccggcgatagtatctggtccggtgatgctggggagctggaaaccaagctatattttggtggaaacccgtacagtgatgggaggtgttttcagctctctgaacatgatgggaagacacggatccgctcctatgagggtaaatatctggtcgttctgatggaacctagtattgccgcgtacctggatgaaggctgcaagggacatactaggttcgatcgatgttctcggtgcaagctccattacactattggatatagttccgagccggacgggggtctttttttagttccgaggggtctgccaagcatgtttgtcctgaatgatggtcttttctactataaagtcgatgttcttaagggtagttattcagaggtaaagcgcgttgaagacatggatgatgcgtcatttttccagtttgtcgcctgaacatcacatacacaatgaagatcgagttgattttctccatatagcatgacatgacaagacaagacatgacatggcatgttatgatatgatataaactaggaaaataagatactaggaacataagatacggtattccagagaacaagcgaatagcagtcatccctcattgcctttgtccgaatgcaaatcgtctccatgttccatctacatcctcgcacagagtcatgaaactgtcatcgtcaatcaactcggacatccagttctcaagaaaggcaatgcgctcagctgttggtgaagaaagataccggacaagatggtcttcggtcatggtgggtgcttcgtcgtttggattgctagccggattatggttgcagttcaagttagtttgcttattctgggtttgcgatgtatcctgaacgctaggtacttgagatatctgttcggcggattcacagaccggagctgtgttttgggaagcagggggctcttcatagagcaataatggctggctcgcctcggggcaagcatttgtttgggacaagagttgggaatccggatcgggcaaattataatgatcattgggttcgacctcaagatgaggtggatgaggttctgggtctttgtttggcctagtgggttgcgaaattggcggcggagctgactggggatgcttctgcgctgctcgagacaagcttgcagcgtgcggctttcttgcagttggctttgagaagggcagatctcgcttaggagggagcatctggtttaactggtcgacgtcatggattgcagatatggtggaaagctgagagcttcgtggctcgggttcctggtttgagatgtgtgcgagagcagatgcatgcagtggttgagatagatctaccggtcccatgctttgggatgggaggttgagagctggcacagggcccaatctggacacagggtgtgaaatagtacttgcgggagaagatgctcgaatgggtgctatcgaagtcaaagtgtgagatcgctgctcgagcgatggtcagaggaatcgttacatacttgtccttccagaccccaacgctcccgtggggtagaagtggactccattgctgctagttgaagttgccgccgtatttgcagtccggggggcaattgaagagagatgccccgacgtccatgatgacactgaagggagtcgttgtattgctgggactggtattttgccttctgtcaatggacagttgatttcgcctagaagagtcaaggccatgaagtagtcacgctctgttgtgaacttgatctgaaaccgacgaatctgcagagttacaggacagtttagttaggaatcaccacccaaattgatatcagaatatacacacatgtgtttcaccgtgaggatacttgattgcaagacaaggcgactttactacgacagcaaagtgtgaccttgggggtggaataagccgggcctgcattcctgccatgcgagtgaagaatacgagatcaagctgctcctaaattcgataacccagatgttcagcattactgactcttgtcaagctttatgtgtaagtgaagtgtaccaggataccatcacctcgaaccactttctgaatcatcctcgatggcacagatccggaatcgagaaacttctcaaagatgcaagcgaggtctccattcccagggacatgattccaggtcaatggaccgacatggtcgatggcagtggttgtatgagagaacttggcaatggctaagcgaaggacctgaggagggatgatgggtggctgtagatgctgcatcctatagactaagagcaattcacaaagagtaaaggccgaggagttatcaatggatataatatagatgaagaatgagcgtggtggctagtgaaatgatgttcatgatgagggcgagattgagagaactctccgtcagcactcccactaattagcattgcccaccccattaccatgtataactagagtgtagctaaaccacttgctgtaagattaatgtatgtctttccttgtatctcattccagaatatttaaattcttgaaagtcatgttgagactcgaaaagatatgactgttgccctaggaacactctatgtaaaatttgtcagcttcgttggttgaatcattccaaaagaaaacatgagcatagaatacaatcaggacatgaagactgatcattgtttctattgtttctattgtgtctgtggacaaaataacaattattgaagaatgtgacagcctgaggccccaatacatacatcgctgagtcatcaataggaacaaccaataatccgataacgcgctctggacaagcgcggacttttggctgatcagtgccgttgatcgcaagcccagctctagccctccagggccgcaaggcattgacgattattttatctttgaaacgtatcgctgactttgatcgccgacgcgcaaatttactactcccttcaaacagccgttgctgctgagcactttgctcttttcaccgtcgcatccagtgttctcaggtttgaacgcgcgaaacctgcgactcaagccgagccacagtcactggccgtcgccatcacctctttcggtcagaatcaacattctatcgcctttgtactcagaccctgaagcagccccacaaagtcgcaagtttgacgcccctgcaatttttcctgctcgactcgtttgcacataaagacgtatcaagggcagcattcctcgagccgtctcttcaaagtctttgatcttgggaccagaggatcttgtctccgattttctctcggattctcgaggtcaagtttgttgatctcatccgttgcaagaaccgaaccaccccctgcgtttgaaaacgtgaacggcgcaacgctgtcgcgttcctttagcagcaccatgtctgcctctacccctcgcacctcgctgcgacgtaagactgccatctctcagcagacaggtgtggtacctatactaacaccacccacagagggcttacgccatgctccaaaaatcaaccaacccttcatccccgatacagcccctgcccgtcgatcacacacccatcatggactcacatcaccacaaccgccgaccagcccccatcatgtaaacatgaatccggccgccaatccccaaagcgcgcagttcgcagtcgatagctgggaaggaaaagacaatcgacaggtgcccatgtcgacgagggaagtcccgaccccagggaaccgaccgctcatgttttcccatgtgcgtgacccttcgaaaatgccccggcaattggattatcaagacccttatttcccgttgagatatctcgaggttccaagaagtcagtatccccatgcatcccatgaatcggctagaaatactgatggccttgtctcgttaagcggatcacatatacaaacgtgcccattatggcctgcagtcaggtattccagacgaagtcgactttgcgctgtaccacctagtacaaatttcaaatcagcggtgggataaattcaaatttgaaggatttcccttgcttgcggaaactttgatgcagaaagcacttgacatcacacaactctgcacgggagtgaagtgggaattccagtatgatccccggaagccgacagaccgtgccaatgtgctcaattcgttacatggtacccgggatattctggataaaattagcaaaatcccagtgaacctcccggacgacagtcttgagacctacgacttcaatcatcggttgagaaacatcaaagaggccacgttagtcttgcgaaacatggtgctcctgaaagagaacgcgttttatgtgtcgcgttatgcaaatggtctattgcgggatttcttgatcatcttgatcaatgctcccaatcaaccgcgactgaatgaaatcaaaaatgatgcactggatatcgcggaagaggtcaccaaattcttgcgaactgaccctgaagatccgctgtggatctctttggtgaattgccttgactctccagaccgcgcacacgttgtgcggtccttgtgggcgttgacacacttcggcactgagctggacgatgcggatgcaaacagggccatggaaaccctgaccagaccgactctccagcagatgtattatcacacgctccttgacctcgacaaggatattctgagtggtgcactggacttttggtatcagtacacgctcagtcatgataatatcgagacattgatggatgttgtcaatttcccaatcgtcttcgttcctcgcatgatcgcgcttttgacctatgaagcacgacccaccaaaaaagaaactgttctccaggaagaaaaagttgcacctccacccactgacattccccgtgtatcccccgagcttttggaaaagctcatggaactgtccgaaccagagcgaagctcccaatggctccgttgctgtttcatcgaggattcagaatgcgagatcacacagatcgctttatggcaagcctaccagagccgatttgcagatccccgtgtcactggagggggtgttcttcccgctgcagagtttatcaaaaacgtcagcaatacattcacaaatgcccaggcccaggtcatcaatggccccggcactgccaccaaattcattatcaagggcatccgacctctagaaactgcgcacacattcgagggcttcccctattcctattgcagatgggctgacaattcaaagccctcaaagatgtgtcagcgtgcgttcacatctccgacagatctccggaaccatgttttcggcgaccacatgaccctggaacccacagacactcccggccagtataagcttgacgccgcagagtctcccatccatacgtgccaatgggaccactgcacacggttccgagcatctgggcccagcgccaacacatccatggtggcgggccatgtttcctcgcatttgcccgaagaccgccccgccgacgcacagcccacaaccgccaagcgtgtggttctccaagagcgaatcgtccgcaaatggtattacatggatacaccgatcaacgaaaagggcgagccatttggcgtggcctacaaggctgcgttggtgctgcgcaacatcgcccggggcctgccgaatcggaccacgtccaaatatggtggacttccctggaagaaggcctgcttcacgagccagcgccccaagatcgtcgaagtctgggaccggaatcgtgcgctgcgcaaggaacttaccgagttaatcatggtgattgagaaggaggtagactattaaatttcctattacatgttttccggtgtcgcaacggcttctttttcgtttatcatgaatcaatatctctgtacgattaataccctgattattcatgttctcactgtctttatggttcccaggtcctctcccttgtctcaatgtacaatatccaagagccaggcccacattggtggtgttttcttttttctgctttgtttttaaaaggcttgtcgctttgatctaagcctaaatccgcgcgcaaaaaggcccccgaaaagcggagctgcattactacctaggtatgggtatgggggtgggatgtctgactttttcggcgtctcttgagatagacattcgagattcgttagttagcaaactgaggatcagggtttaatccacgctttttttcgttttacatccgtttgatttgagtcttttaacctatacgcaaaacaactttcccctcatcccctcgcctcagcagcctcttcctccaaaacccgcatcgcatcctccgccctcgcaacgggtacgtagatatgatcgtggaaataaccgctgacaacattggtactgataccgtggtccttcagccggttagtaatggcagcgatcaagccgacggcttccaggctggagtggatagtaagggagatcttcttgcagggaaagattggctcgttgaagtcatgcgacgtggcgagcgcttctgttgtcacgatcgttgttccctcttcttcttgcacgattagttgcggttggagtgtcgagagaggtagtgagtggaggggtgatttggttgtgaggaagacgtagattgctgggtctaggcttggttgcattgttgccagaagaattgagatatttttttcacctggaggtgccattttggaagttgaagtggaataagtagctctgatgaatgatatatagggatatggagtggatgtcatcttggggcatggtttagctcgaagaaattaaccaatgagagcacaatataggatctacgcgaaattttgatagatgtttgtgataggaaaatatgtaaacttgcctgaatactccttaggtttctaacgttggcgatctgtctcttagctgtactataacaataataagccttagagaatactcggtccccgtactatcatttccctatttacttattacatcagtctctcttgttcaacaatgtagccaagcaatgaggtgggcgataaccgcataacgagtgattcatcgaaatattcttttgaattctggcttatatagagctaacaagctaagactagactatggaatttaacagatgtcaatctacgtaataatactagcaataataatatccgaaaaagaacttcacacttagtagtcacctgtaggcattccacccacagtcggaacatgctgtccatggaatccgaacccaacggccccgtcgacatttgctcgaccaagctccgacaaattacgagcatcgaggcagagcagataactcttgctacgcatcccgtcgagaaccacactaagaagtacgccatcatcctcactagtgccttcggggttagcgacgaaaatgggctcgccaggcgattggccgtggcatgcccagagctgcacttgctgggtatcacaatcgagcttcatgataccatctgtcagagttgcctctccgcggaaggtcacagcgtagacatatcggtgtttctgggtgacaattttcggattcagagttggcagctcaggcgacaacgatttgcaaacagaccactcgactattgctttcttgggctcggtgcatggggcggaaggcaccgcaggcagtcggaaccgagtaaatgatgaacggaaagaatcgtctttcttcttttggaaggccttggctgtatccaatgaagagatcaaattctcataatagagagattgcaaacattcagaactgtcggctctcacgacatctgcaacaatatccaactccgccggattctccttcgagggttcgagccatgcgttgaccgtgtggaagcaaaagaacgcagggctttcgtatgtcgcgatcaatcccttgccatgcttacggtcaatgacatgccacactgccggctgacttgggtctgttggcgagatcgcatctatgaacgaggagtcaaactcccgtggctttatgtgcgagttccacaaacatagcaaaatgtggtcctccgtgatgaggaatgagtgaatataaacaggtgttgcggggaaggttgctaggattgtggtttccccagtcgaagccgagaccccgaaaacacggtatgtacaggttggtcccagcgtgagattataattgaacatgtctcccgtgatagggtcggatcgggcatgagatgcagcgaggtgccccgaaagctcagggtgtaaacttgtctgcgaggccaggccgatgggctccagggtttctggatcgagcttttgaaaggcgttgtagtcggtcttcgcatagagggttcggattgctcgggaatcactccaccgagaagctgacttcgactcatcgggcttgggatcaaggcctggaacattgatcgaaagggtgacagatatgttcttactcgacggagtgggttgcgcgacatattcagtctggactttgcccaagacgctcttgcagggatcgcgtttctgtccgaaactgatcgtgcgcagagatcccgtcttccttgctagttcgatctggtcatcggttgagaagcgagagttgtagaaaacccgaggtgaagtacaggagtcatctggagcaaagatctggaaacgatggttttgaccgaatccatcgaaccagtgggagagacgcagtgtttctccattctcggcttcgacatggctttttcctggacctgtgcggtacagaactccagcagcgtaggcaggaatatgtcctatcacagagagctcgacgggtttgcgctgttcgtattcaggatcgaactaaacagggatgagcatgtataattcgggggttctaactatcacttcacttacacccttgtcattgggccagttattataataatcttctgtcctatcattctccatggctattggatctgggccaatagaaggcatattctccaatgtgacgtgtcttgagattgttgcctgatattttaggccaccaattctgtttcttcccccttgtcgttttgtcgaatctgatttactgaagagattgataagtggacaatctatgcaccctttatatatttctcaaacaatagacttgtctgctgggcctaatctttgtgttcgtcatgggcggggcaatcgcgacgggctaaatctcacaaccgacttctccctttagctcgccaatcgccaacgtcgaattaccgagtctcgctcatcatcgtcgctttgagccgcgccaagtctacaaccgacttcgaatctcggattgcatattcaattctggtttcatccggggatcttggcgggatatacccactcgaaggctgttaatagcccgtcttccgcaaatgatctatcttgtgagatccacatctgaggttgtcaccttttcggagccttctattaaaccgacgccaaccccccatgaagcaacgagtacaaaagccagagaccacaacaggcccaaagatgtggagatgtaaagaatgtccctccaattttcagcgattagaccatatgaaacgccatgcccttactcgtatgtttccaataatactcagatggatacagtaatgacttgccacagatcaaacggcgaagagccacatctgttcattttgcggctctgtattaagccgagggtgtgtcatcttccatcacttccgaagagagatatctcaccctgtcatgtgtgctgacaaaaacacctagagatgtgctacggaggcattggaaatcgtgcaaggcccgtgtggacagtggccatgcaatccccgagccggagcgcggtggaaaacacaaacgtgcctgtgatagttgtgcaagcctcaggaaagcctgtaatggggaaattccgtgtgcggaatgcacccaacgagaaagacaatgtacttatcaacgccttctcggcgacgagcttcccttgccatccatatcgcaggctttattagggaccccggacgccgaaagttcaggtgtgaataatgatgcccctaaggttgctgagtcaagttgggaccttggccctgcaacgctttacccaactcgtacggaaattaatgctcgacttcagaaattcgcttttggctgattagaaaggccaacaatctgttcttgacggctccctcgcctttcgtggcccgcattgaagattttcattctgtttcgttaaagtcattaaaagtaccatttggtgtaactattttttaatagattcatctttaattatagttaatttagaagagttagtatatgaaattgtatggtattaaataccatataggcgtatatagagtatagactcggatatactaaaggtatacacaattccatgaatagaggtaatctcttctttttaaaaagctttaatagctaataagaccctaccctcctactctattgactttatagacaatcgggagcatattggtggcatggtaggtggttgaattgacaaggtactaatttacggacgcgttttggttggggtgcgcagctcggttgcgtgcgcagctcgcttaccgaatacgttattagctttgaaggataggcatctctgtgcaatccaagttccccttcactggctccccgatgtgtagttttcaccgtggcaagaaaatggaatcgacgctatcgtagacattgtcgataaagttctcatagctcaaccaagccgtgtcatcggagctactttgcagagtcgggtcgctgaaatccatcgcatcccacacattgggccagggcaccggcgcaaaggaagtcggcacttctgcaacgtgcgagtctcgtggtccatcgacggcctctctcaaatcaagcgagaagttcgtaagatcctgttgacgttcagattgttccgagaaaagctcgggagaaatgccgtcaaaagagtattcttggcgagaggcatcaataccgagaagctgatttctttgcgttttcgcctgtgacatgagcctctctaaaggtttccagagcatgccctgttgagaatctgcaattacgagccgcgagcggtggtagacatcttcaacgactgtccagtactttgacatcaccgtgggacttttgcagacacagagttcggcaagagccacggccaatgcgtgccacggaacccacatcgactggtaccaccgccaggacctggaacctgggtggttgtatacctcctgcgagcactgcaggttatcagctgcgattttgagaagagcattctcctggattttcgggggtatgaaattatagctgcgttgcagcggccggagacatgctagctgcagccagctacccataagacatgctgtcttctgcgcgtaccactggaagtccgacaggtcgggcctgcagcctcccagaagtactgacgtcttttgttggaaatcgtggacgacttgctgccgcaaactcatgatagttacggctggctctgtgacgtccgaaaatgcaagagttcgagtcacggacgcagccgctgcgctaaccaaggtatgcgtcatgtcggtaaatgtgccttctgtgtgttcggagattggccatgtcatgtcaaaccataggtcctcgtcgttgatgttcaaaggcgggttgtaatcgagccatgctgattgcatcatcggctcggatgccctgtctagggaggctgctacatcgagaaggccgattcccagccatgctcgtttgcgcatctcgtgctcaaaagggcgtacggtgaatggcggctggggcatgtggagagataatgcctgccctactcggagtgccatgctcaacatagtccagacccttcgactttggtcttgagatcgtgcggcgagctagaagggtttagattagaatttcaagatgaaggagcacgaagacgataaaattgtagttgtactgaccagagagataatataagcttgcagaacagtgagatcgttcgtcgtgacaaagtccgcctttgcgagtgcagattcggtttctttttggaattctgcgactattatcttcttgctcgtgttgaacattgactgagattccacttcgtcaagagtacaaacagcgcaaagataaatagccgaagcaagggtggctggtgcctggtgatcctgctcatagtcaagataaggcttgccatccctaataaatgcttggagcgacggccgatgtaggattttgaacagaggatcgacattgcggaagaaaatatcacataacctgtgccggatttggggttgaagatttaatcgactgttggcctggggtgagttcgacgaactgtcggggctttctgagctcagaaccgacacaccaaaaccagacgctgaatctttgatatcgtggttttcattttctagacgatcttccaggacactgcgcaattcctgggtctgtgattgtgacatgagtcaatcacatccccaaatcataagtttaacaaacttacttgctgcatgatatcctcccaaaatggaccccccacatacgcagttgaagggcggggaagatgtggctgggctgcaccgggcaagtagtcgtgatcctggtgagtatcaggaccggtcgtgctggcctccgccaccgattcctgctgtgtggatgaatgcgaaggcacatggacaatggaggaaatatgcgattcatcacctcgttcatttgcaactatctttagaagtttctcgagtctcgctacccgctcggatagttccttgtccgagcctacaatccgctcaggctttcgcgcgcggccgcggggtagacgcgcacgttccacaggaatacacacgaggccaagtcgctggcagcttgtacaaggactcaacttgtcgcatttcactttgcgctggcgacatgcttcgcaggtgaggcggacccgtggtgcggaggaccgtgagtgggttgtcccgacttggcccacgggatcggccattattcaccggaacacaatttgtgtggctggaaatgaggtaaatggacttgagatggattgttcaattttttcaatgtacatccatgcttgtcgaagatccaaggcacttgcatgcgaggttctgcgccacccccgcgaagctatcgatccatattagcttttactggccaaccagggcttgaattggcactttctgtatttgcggatgatctgcgcacctcaaatgcaaaatgcaaaaaaaaagaaaaaagaaaaaagtgatgaatcggcagagttaatcagtaaaacgtcaaaaaggcggtaggctaagcggtgcaatctacaatacgggcaatattatatctgcatgcttgaggctaaccatactaaccaatcatgagtcatgatgataacctacaaggatggaaatgggtgactatgtgcctaagtacctttctatacatatctaaatcaataagaataatagtctttcttggtactgtttcagatgtctttttagctgttttttattaattatacgaagaagttaaggtgacgatagatagggtagaatttagaactagatagaggcaccgcataaacctatgatatatctctaatctctaaacttttatagaaaggtacttggatggtatcatggtcgatatggtgagaatactatagggaaatggtagctagtaggatcagtttgctatcaggtacctctctctcgttcctgctctctctcgttcctgctctctctcttcctccatctctcttcataccatctgctcttcttatcctcacagcacttctgcaatgttcgatccggcatatcctccttctttttactttatgctgaagcttcttatcgttctcttgacttatcagtgatggctgatccagctcctatcctctggccttcgcaccatcccagggccataactcttttgtcgcctcgcaaaaggcgtcgttatcttcgtggatcagaagagtcggagggtgatatgagtctggagcagtacatgcactcctccgagatctagcggtcagtgtcactagtccactacctctaccggtgaaaatggagactatgcctgccctagaacagaggatcagtccactttacccggagattgaagccatcatgagccggcacaatcttaatgtcacctcaaccttccaatgtgggaagatgagcaaaccaaactatcctggaggtgatatccctttgaacttcttctgtatctctacagagactactcagaaaagagagtcgttacccaaggacacggagaagtcctagtgaaggtggtacttgtggggccatggacacgcgcaaattggttcgagctgcgaactcaaatcatatcagttttcgcgatataagctttatttaaaataacactctgatgtcttatttagacgtcttttttactagggtttcaaaaaggtagaaggataatattaccaatgagaataacagtagggagcagccataccgagcttacttcctctataccgtatgataacgtctttccaatgtataatggacatcactagatcacaatcaaaatgatcgcaaagtactccgtattatccttcaatagtcgatgcttttcttcaccgtcgattaattcaaatactccggcaccgtgcgcgccgcccattcccggttgggaatatacgaattagatcggcatccttcagagttttcgatttcaccgagagctagagcctttgcaaaaatatggagtattgtgtcgtgaagttgtaattagggcagtaaatattcaaatgtttgaataatcaagatatatccccgaactccccgagattggagtttcaggttccaggtttgttcagatgcaaaaatgggctgcagaagtgagtgcagatcgcaagaacaataggattgtactgccccacccctaacccctcctgctcctattgaaacgaagaaaccattctgtagggtcttgatgggggggttatttgacgctattgattttatatcataggacacccacgacgatgtagcccggtttatgggggtaagacgatcttggccgtgagtggaccaatcgctactcagagtttttttcaaaaaaagcaattattcccacgctttgggggttccacgcacccacctgcagtgatgcaatcccaagcaggggagagattcctattatgtacatataggccgacaaagcaagcatggatcaagcatttgaatcgacgaatcagagaacgttttgctgaaaacaaagttcatgccatgcggagaccatgtggtcttcagggcatccttcaacctcctacctaccctcgtaggtaacctgtactccgtacgtagaagtatacgccgtatactcttgacaataatctgcaatttacggtgtacggtgtgcagcggacatgacaaatatcccttatagtcacaatgcacgacacaaattcccgctttctactgatcgccacgtgagaatgggcccgctaatccctagtcccttcggacaaccaggctaatgggacgaatatgaatgcatatcttatcaaattaaatacttgtctactattgctccatatctacctcggtggctgaatgtgatcttcaaatccggtggagagggacctcttacatacctcgggctttattttccttttattgcgtacgccatactttacggtctcctatccctcctttgtacatatgtattgagaagcgggccattccctaatcccgggatacttgatctcgagcattgagaaagtgccgttcatatctactataagtcaaccggggaactttgcgatctctctttcagcgcattcaacacccttctgttcatcacaatccgtgcactaaactgggccttcactcatttatatacgcctttatgacacgatgactactctatcgacaccccgtggtcaccaggccctcgccatcagcattgtgtttacgactatagcgacattaattgctgccgtgcgtatacttacacgagcatttctcgtaaagcagatgggagcggacgactatgtcatcctagtctctctggccttctcgtgggttttcttcggcctgatggtcggcgaagtctaccacggcatgggtgagcactatagggatatccccgctgcaaccttcaagactcagatgctcgtaagttccgcagcagaacatccctccaacaaagtgcggttccattgacatggccctcttacagtacttctgggcttcagttcccatatatcaaacaagcctcatcagcacaaagatgtcgatccttctccaatataaacgagtcttctccacaccacacatgcgccgagcgtgttggctcctgatcggctttctaggcttctacggagcctggaccatcatcagcgcctgggccaactgtgttcctctcgcgaagttctgggatccaactgtcccaggcttctgtttggataaaaaagccttgtggttctccaactcggccatccacattcttaccgatactctcattctcatatacccaatgccagtcttgaaatcgctacaattgcccaagaagcagaagttcgctcttattgctgtcttcgcgctaggtggattgtaagtccgcctcaatatgatgagaatcatttaacaatactaacaatcattcttccagcgttttgatcacaagtatactccgcctcaaatctctcctcgttatcgccaactcaagcgatccaacctgtaagtactaacaatcacctgcaaaacccttcccttatccacgagccaaatctaacaatctaccccagacgacaatgtcggcgcagcaacctggtccgcggtcgagtgcaacgtcgcaattatctgcgcctctctcccgggcacgcgcgccttcctctccaagctcctgcctcacatcttctccacccgaagcaacggctaccgcagcaggaccacgcgacatacgcgaaacggaaaccccctcacagcaaacggcaacacgcaagtcctggcctctgtcgtcggtgggcgtggtcacagctcggattatgaccacgatctggaagctctgtcgccgtctggttccttcaatagctacaccaaagagcctgtgaaggaggtttttgcgggaatcaaggtcacgactaatgttacgcaggagagtacctcgcattcgaagattgttattaatgatgatatgggcagtacgaaggaattggtgaagaagcatagcttttgatttataacgatttgggttgggttcattctctatactttctttttttttctttttcttttcctttcttgtctggtggtcttctctcttgttttatatacctatggctcttacgtggcggttctttggcttttacgcgatgatatacccaattacaacactattaccatcgaatatccaagatatcaccacattctcgatgtatgagggactggctagtgattcattgaagccgcggatcaaaaaagatctaactaatcaatttacctcgaagcaaaattttatcgatgttatcagacaggacatggctagaattaaaacaatcattttattaaactatggtcgttccagacctcaagggtacctacacagtcttcaaacatgagctctagggtattatggatgcattgtaagacaagtgtacagatttcgaggcgaacaaaacgagctgatcattcagtatgcatggaacccgcccactgtacattcgaaagccgccaacattttagagaccaagagctcgtaacaaggaagatataaaagggaagaagagaaaaaagaggaaataattctaggaaaggatattgaaaacgattagcaccggtatgtgcaatcatgcttgcaaatacgcagctgtcctcgtgcaaatcctagaaattcaatatagtggtagaccttagatcggttgcaaagaagatatactctactcccaaacgttggaaaagaggtcgtcagatccgccaaatccactagacttgttatttgtgcttgtagaggtagggtgggagaccggggcagcgctggcccagccgccgaagtcctcgtccgcagccacagtgggtgcaggcttagaagcagcagcactgggtgcgccccagccgtggcccacgtcgttcggagtcaaggtatctggtaccttcatcatagatgcaggcgagggtacggcatgatgcgatgaggcatgatcaggtgtgctccacgcgttcccgccccatggatcaaagcttccagacatcatgctggctgctgctgcgttcgcagcgctggtggctggcgctttcaagggggcaggaggctgcattgggggagcagaaatattaaacgcagatctcatttcctgccgaggagaggttgcagtaggcttcgggggtgggaccgttgaggcttttgtagtaggcgaagaaaatccgaacaagtcatttgacagggacgatgatggagggttaggcttaacagttggagaagtaaatccaccgaatccgaaatcttgcccactggagatggaagttgttcgggactgagacttcggggctgacacggttgcggaagtgaagctatcgaagaagtcgcccgtagaacccgagggtgatgtaaccttcggggcagcaggggtcgacttggcgccgccgaaggatgagagattagagaatgccgatggcttctcagccggtttggcgagtggaggagaagtagtggtcgggaagctcagtccactgaaggcgtccgtaagaccgcccatgtgagacgaagcggagggggcaggaggggaggccatgtcgccgaaggagttgccccgctggtgctgcacggttgatgccggctgcggcttcgagtacaatgacaagattgactgtttaaggtctggccgagacattccggctggtgttgctggtgtggatgttgtgctagacgggcgactaccagtagaaggctgggtgctaccgaagaagtcaagacctagcaatgaatcattgggtttgtgaattttggctggtgcgggctgtgcttgtctaggtggcagacgcggagcaggttcggttgtgctagggcgattcggaggagagatatcatcgccgaacaaatcaatcgaggcttgttgacggtgtaccgggggctgactggcagcggcggctctttgcgaagcggaacgttcaatttttgctttctcctgtacaaccgcaagaggctagcaagtcagtggttactgctgacaagatggtttatcatgcaatcactcaccacatcgtcatcgccgtcatctagagttgaggggtccggaatcccaccgtccattacccatcgcttgctttcgtactttgtccggatgaagttttcgattttcctattcacaataattgtcagaaaacaccaccacacaacgagtaccattagaatgcccttacgcatcggagggaacgtggccgggtgccagctttgcttcccagtatctgcatcctattagcccatgcccaacgtggtcggtcaattggttgcgacgaacttgttggctcttccattgccccatctcacaacactctgaagttgttcatcggtccacgaatcgagatccacggatttgactcggctgatatgcgtgcccataccccggtgaatgcccgagcaccgaatgcaaacaaagacacccaggttccaggaagcccatcgcggatctattcggaagacaattcagtatatgagcgccaagaaatatcctcggatatgaagccagcgtagggcgcaatttcaggaggggatcggaaaccactcacgcttgttccgtttacagtcggcacatatcttgttgtgctcgagtttcagcaaagtcttgattgcctgcgtgttttgggcggcttggcctggggtaggacgtcgagacgacataatagtaacaactcaagaatcgatggtgaaaaagggatagggaaacaatgagagccacctaattattcttaggtggcggtcggcacggttgcggcctaaggctatcggggtgtatacggatgagggaaaatgccagtcacgcagtttggtataaggtaacatgaggtcattggccgataagagtagatatttggaaagataaagtacattgtatattgtattatatttgattttcactgaattaagctctacaaagatggttggtccactcaaatgacgcctctcccccgtatcatgcatgccggctattctgcagccttagtccccgcaaaccgaatgatgattaaaagtcatgaaaatcccttagaccttcgcctgagggtccttagctgcaccggcatcttctgtaaatcgcagactaacactattcacacaatgacgctcgtccgtgggagtcggatacccctcaccctcgaatacatggccaaggtgacccccacagttgctacacacgatctctgtccgcttcatgccgaatgtgctatcaacatgcctagtcacagcaccagggatggaatcaaagtatgctggccaaccacagccagatttgaacttgtggtcggcagtgtaaagcggcgcattgcaaccagcgcaattgtagacgcctttggacggatagtgggaatcgtattcaccagtaccagcacgctcggtacccttttcacggagaatacgaaattgttctgtagccattctcgtaagcaaatatcaaccgtatattgcgtaggagttgaaactccatggtgtgcaaacctgggttcaaaacagctctccactcggcttcgctcctctggtcgggtggcgacatggcttcggttgctttctcggggctggggttggagctgaagaaggcaccgaagaatggaatggtcggtgcagccctaagaatcctggtgctcgtcttcgaatgaggaggcttgcgcgttgaggacaaaaatcgggagaagcaaaatggtggtgcaggtcgggtggggatagtctgtcgtttgaggggcgaaataagactacgagataggtgagatcgcatagagacgagttgatggggaaatgagaagaatttctagtgaccggcaattgatgcagagatgagagtggggtgaagctaatcctatatggcctaactagttgggtgaactgggtgcatttacgtcatcatgcggggagacggttcggggactccttgaggcctagactgatatcgctgtacaagatttatagggcgaatagatttttatatagctcgtaggctacgctgttctaaacccgatgatttctttctgaaaaaaaaaaaaatgtttgattaaacagccccaggtcccacctgggaaaactccggcagtgcaggggtatcttaacaacaaaatctgacatatgaacaatattgaagaaaatggagaagaaaacaagtcaaagaaaagtcaacggcgattcacgccggtcaccaacatggagccccggttgagctccacacgccacccctccttcagcagcatgttccacacggcgggtccaatatgtgacttgcggtcgagggagtggtgaccaacaccgcacacaatgttgaacccgccgtgggagctctggcctccgccacgaacgtacttctgatctcctagtccgtcccaccacgcctggactctctcgcgagcaatcctgaccgcgttgacgaccgtcacaccatgcagatctaggtcatattgcgacgactggcgggccaccagccggtcagaagctgttgccaaatgacgcatggcaagctgacgttgctcgtttccaacgtcccggtaataggcggaagcgccgccgtacagcgggtttgagcgtgcgcggcgggcggcttgggatgcttgggcgagggcaactgatcgggctgcgaagtgagagttggcagcggcggcagcttcatcaaactccatgaaatccgaagcagaatctgcctgctgggctggcgccacgttttcctcctcgtcgagtgcgattggcgacgaaacgaaactgatgatatttgaaatgcaagtgagatcagggcgacgggccaacttttcagccagttcatctgcggctgagatctgattgcttgatatccgaaccaagcctgttagagtggtggcattgatgccggggtacttgtgactgagctcccccacttgtgtaatgagtacaggatcgtcttcaatctcctggatgtccttgggcccatggatctgtgccaagactctgatcgtcgcaccgagtgacatggagttttcatgataagtcgatgcgattttctccctttgcaaagcgctggcccgcgaggaaagaaactcgatatccttctttcctgcctcccatttattggcagaggtgttgttcatggcctgggatgccagttcgattcgacgttgttgttgctgctttttcttctttcgagatttcttactgccgttctggttctcgttggcctggaagccatcgattgacttgggagtggagaattgaccgccttgagcagcctctttgggggtttcttgaggaacttctctggcaatttgtgtctcttcgatgaaagcaagattgagcaaaacatccatcgaacgactgaggttgtcatgacaatcttctaggatgcgctcggcttccagacgagtaatacttgggaacatgctaatcaagttttgtgccttgtcagcagttgacatgcccagaaaggtgtatgcaagcttagagcctttgagcttttcggcatggcgactagcactattggagtcaccattgtcctggtcaagactttcgagcgatggccagcttgtgaaatccgatggtgcgtcgtcagacgattcgccgcccaaagagcctgaaacgtcagagttccggaggttcgttgtgcctgtggggtcaaatggcaagtctgcttgctcaacagcagatgcgttcagcaagtttagggtttcgcgcaactgttcgacctgagtggggatcgccaggtcaaagtccgatacgatcgcaacaaacaatgcaggatcaattggtggacagtaggtgctttcaagctcctaataaagaaatgggcattagagcagagcgtgacaagtgactagtacatcacgctatgcctacactgtgcgtgaatcggtgggacgcgacgtaccttgaagagctcatcgccacagtcccccatggctgtgatcatggacttagttgcagtggtattggatgtaatattgtcattccctatgaaggactgcgaggttggataattgtaaaaggcgttaggggagtgatgaaggtgaaaagtggcttttttccgtgatcttaatagctttgcgataagatacctagagatagagatcgatgcggcccggaagtaatgaagatgggggaacgaatcacagagccatacgacaagtcacgttctagtatcacgtgggtggggtaagaaatggcacgtgtatatagatcacgtgctcgggcgagagttttgaatggcgtggctaagcctcaaaacagaactgagcggagggttgcttttcatacaatctagaaactgctacctaacaacatgtacttgttccatcctatccgccgaaatctatacttgtgcatatattgtaatatctacctctgtaagctctacgaatgtttcttaaccatgtaaagtacacactccattgtcatggagtctgctgttcatccatccctataattaccaaaatgctggcgatatgtattctttttcgtctagaatgatttgatatcactcaccggtcgatccctggatatgtatgaagagagtcgttctattctgtatgtaggaattggggttttcaaccttcaatatgacgttccttcccaatatcctaagctttaaggaatatgaatccaagtcagagtaatattgatagtatatctacgtaggcacaaggacgaactaagattatgtttggaacaggctgtgattcattcatgtggggatgttaagcgttggaaaagaaaaaaaaaattaatgaaatacagacaaggtataatcgtgtagtgtaccaaagagggagagaaaaaggaaaaccccagacgctatgcgaagagataaatcagggcttgtgcccgaacaccaggcccacacattgggccagatatacatactgcactccttagtgccagatgaccaccgagccaaaaaaaaagacgcaggaatcaaacaaagaggaaaccctccgccaaagccgcatttcaccttccctgttgctagatgccgatgagtgcataacgatacgagcccccttgagaattggtacacggggaattatgaagaacatttggaaggatatgggtaatgcatgaaaatgggagaacgcggcttgagtgtacatctcctaggaacatcctgaaccgacaaaaagcatgggtatttccgtgagctgctagaaacgagaaagcagaagtgaaatagaaagaaaacgagtgaggatgccagccccagatcaccacatatcatcgtcatcgtcgtcatcgagttggacgtcgtcgccaaaggacgtgtttccgtattggtgacctgggccataagcttggccattttcatagccctgcttgtcgctcctcgaatggctaccgtagcgatcatgcgaatcgtcatcatagtcgtacatggaagagtcgtcataggcactttctccgtagtgttgttggtcctgagactgtgcgaggctgttagcaatcttgctttcccctaggacaaggggcatcttcgcctacctcttggtatcgctgatattgcgcatactcatctggctgatcccttgattttgatgatctctgggatgatccagatgaaacaactggcatctgcgggtgcatctgctgtaccttggccaggtatgagtacatgaagttgctcagcaacacttgagagtacagagctcgccggggattcgcaagcttgatatgcgccatccggtaaatagctcgctcctccaaaattgagaagcgagaccacggataatcgacgtcggcgcgaagtactcgcatcggaggatcaggagaaatgtttcgtgacgaatgttttcggtggtggccttcattactgtgtttctttcgcccaccgccgaaaatagaagagaaaataccatccttttctttctttgattctcccgataccctcctcacgttgtctttgcgtcgatcttcatcaaccttcggatcaaggcggtccaagacaacactttcccgtccccgcggagtgctctcgatagatgattgtaaaacatctagacgtgtgttatcatgcgttttgtcgacagtctttgatttagtctttttcgagtcggcgtccttgtcttttttcttgtctttttcttcgctgcccaacaaccagtgccagctagacttgcggctaccatcagattccttcttgtcttttgatttcttgctctcggatttgcgttcttcaggtttgcgttcttcaggcttgcgttcatcgggtttgcgttcttctgagatggtgggtatgaatgaaagactgtcagtgcgggtactgttgccaggtatcatctgagggttattggcgatgtcattgagtgaagatgcgggttcgtggggtggtaggcgagggttcttgggacgtttcggtatcgggtcctgcgaagatgtggatttcgatggcgatggggttgtagatgccgtggcatgatccgatgactgcctactttgtgaaggcggacttggtatgcggtcgggttcagtggcgggaggtgtttcaattattgcagggatcttctgctcgcctggagctatgttcaaggtagatcggccattcgagctgatacgagaatgccatttccgtgtattggtcggatctcccgaatcggatcgatccagatcagcatccggatgcccaccagaggtcgacaaggcttcctgctcggcctcaggctgatcgacaatcgaatcgaattgagaactcgtggttgagcttggtgcataagctgagccatgcgatgaggcagaggtagctcgagccgctcgcgtcgttttgggattagaaccagtggagacaccggtgagctccagacttgcgggatcttgaggtgagcgaacacctgcagatctggtatcactccccgcagattcagataccccccgtccgactcgtttagaatagggcaacttttcgccctttttcaaactgcctttcttatattgtgtccgagtcgaccggcgtaggctgtttcccggaggtgcgggaggcaggatcggcctgtcctcgtttcctgcaatggcaatattccgcatgccgcgcaagagtgattctttggccaccacttgcgaatcatccaccaagctttccaactgctgcaagttgggactcaacatcccaccttgcttatttgattgggagcgttgatgttccaaccgatctgcaccatctgtataacccgccgaattgtcgatttgtctcgataacatagagcgtttgcgattaagaccacctcccgacccttgacgttcggcccctaaggtcgaagaatcgccggatctgcgctttatgaggtcggccttgctgtcgagaaacgacttgaattctttcggcgccagttctggatgcagtcgcgcaggaacccaaaataaccgagaggcgtcatcttcgtcggcggagggcgagggcggtggtgcgaagcctgggaggtcagggtcaccggcggcagccacatccattgacatgcgccgaatcgcggcgagattgttgagttcctgagcgacggccgcagggttggattcgtagtcgatatcgttgagaggaaaagaggacgttgcagtgtccgagggcaaacgagtaccatcggcattccccggatcactttctcggtcataagatcgatttgtgacaagcggtggccgttggtttccatttgtctgtgtcggttgcccatctgacgtggattgatgcagtggcgaggacggggaaagaggagactcagaccctgcggcggcgcgcgggatggttgttattgactcgccgaggggggttgttatataactcaggcgcctcggatcattacgatcgtagtcgtcgtcgtacatatgtccgatagcttccgtcacatgatggcttggatcgctaatcgatagatgggtggcatggcctctccgcgtcgcatgcccgccagcctcgtggggacttgtggaagcctaaacaggtgcaaatatcattagaatcaagaatgcgccagtttagagtcaagatccaattctcagagtccatgggaaggggtccaattccacaagaatgtgattgtagttgtgcttgaggggttcgaggttgaggggggtatcaacaaaaaagtcacgcccacatgaactaaataccaaggaccgagaaagcgacgcacctgcatggaaagccagtggtacaggaaccaaaagacgccaaagacggagcccgaagggcggaagcttaagaggagggggcagtgtcaaccacgttggatagcgaggaggaacgggtcatcgaagcggggaaagaggaatggagacaaagaaccggtagcagcgtcctcgacatgcggatattatcgagtccgaatgagcgtcatgagtggagaagatctgggagaagaaaggaaagaagagaagaatggaggatgggagttgagcgggcggagagcagatgagagagtaacctccgcggcacctgactatcttgaactctttccaaatgcaaattctattatatcaaaagttacagctattttcctactcttctgaatttagatcgtttaggggtcttttacggagtaggtatcaattcattgagcactgttggctccacctacattaaaacgggggtagatggacgatcggttgatctacatcgtacacgttcccttttcttgctttcttccctttctctctcgactccatactatttgattcagtgatacattctttggttcagattctaacatcggatcccaaagaaagtaggtactacctttcagagctgatttgcaatatacttcttcgatccgtgacacagcatgtacctcgagggctgaaaatctcacctctctcgtgccgattatattcatctttgactgagattgaaaagcctagattgacacgggaaaggttgaaagcatttgagaaaagcacatcggccactgcaaagccgtttggtatctctttatctgtaatataaactagacggggtcatctctgagattcgataggatgccgtgtgacttgattcaattccccgtagaccgaggacagtagctggatatgccatgcaaatgttcgcacaagccaggccagaacacaaagcaatcccgaccagtaagaaacttgagtacatatgattatggtattggaatcaacctatcaaacgcaaaatgtcaggtccattcaaacagagctgaacggtattttcaacataagagactaggaagagaccaatgagacatagatggaataaactctgaagaaactctgcagaaactcttggggaaatcacaatcagatgggaaatgctctgcataaaaccgaaaagatccacgatgaccgtatccccaagtcccaaaccgaaagagaaaaaaaaaggtatgagaacgggaaactccgcgctgaagaatgtaaacggcaccaacaactttaacttagaatgagagaaagaaaggagaagacaagaggttgacgaatccgtatacgccaggatatatgtagggcaagagttggtgggacgtatgttcatcaagtcccgggaaaatgtgcatcaagagttcatcacagtgtgtgctacatggaccgcatcaatttaagcctcaacataattgctgcgaatgaattagccattaattctagaaagtgaaaggaaaaagttcttaccttgggaagatgcccacgcgatcaccaatgcgaccagtccaccagtcttccgccttctccgtccgcttgattatggtaataatttcacccttcttgaatccaaggtcaccctcctgatccgcatcgaatgtgaaaagggcaacggcttggtctgaccgcaattgggctgcaccagtcctttgctggaagatcggtttaggagcagttggacgggaaggtctgcgatccgaataggtatattcctcttcagatggcgcggtgttgctccggttgcgcccatagccatcaaatgaattgtcagcagcggcccgagctgtcacggaacgagaaagccccgaggcaggccgatcatagacatcatcagcccaggtattcgcgcgacgcggcctatcactgtagctgtaatcattttcactggtgttggaccgaccacgctgggtaccttgaccgtaggcatcgcccctgcgtccctcccagaccacgtcgtcatggctgtcgtcatagacaggaatgtcattgtacatggaatcaccgtaggcccgcgcatttccttggaatgcacgggagttcagcacgcgcatcagagcatcggcggccggtgggggacgaatgctgcctgtgagaagttggctagcggagacacgactgcggtacaatttctcgttcgcatccttgcgttccaccagcatactaccttccagactgacaccagcgaaaagacctttggtttttgagtaggagaagacggccgcaacacccttcgtactggctgcgccagccgcctcggcatttcggccaatcggtccagcagcgagtgatacattgccacccagcgtcagcgttcccacttgcgagaatgtgcgaacagcagcggcatcgttgagaatgaaaacaaagtcggtcaactcaaacccgatctgtcctccaattccggcacctgcagtcgcaatagccgatggagccgaccaggagccatcgccaagacgagcgacaacgataccggagccgaatcgaccagagcctaggaaaccggccttcaaaaccgtgagaatagcgagaccctacggggaaagatttgttagtcacggatgttcccaaccggggcattatgaatgtcttacctttgcattggccaaaatctccggtggaatgactttgtcgggaccgaatgcttgcctaggatcaacgaacgatgtcaagatctttgcagcctttttgcactcgcctggtgagagagaatccactgtcagccggatatgccgcgcacgactgcggggaagtgggctttgagtatcgatgaaacctactggtcatagacgccggcagcggattatggatgccgaaacccattttggctggtgactatcgaggtagaatcgaaaatacgacttgggagggaggaatgggggggaatgctattgatgtctcgagggcaacggttagtcagtgtgggcctgcccagctgatgacggctaacgcaggacgctggttcgtgggaagccaacgtaccagaacgccgagactggatcagatacatatgttgtatgcactaggtattatacaatgttggagatgctttgtgaattggagagcaaacaccacatgatatcccacgggcaattatgggctgaaacgagcatcgtttgtggcaaattggggttttattcacaatgtatcaggaagaaaagaagaacgacccagagatattttagccaaagcgacagtttcccgatgggtagagaaacatgtaactatagccgctgtataactcttgtataaatcgtaagcatacttgcggatgcccaggcgccaaggccattatcgtatcgcgattgtcccgaggccgaccttggaacttatccatctccatacacttcttcaattaagcataaggtcatggttggattatgataaatacgtgactcgctagacgcgaaaatggcatcaggtatgttggatatcccacacctagaaacactgctgacaggccaactcacccagttcgcatttgcgtttgcggcgatgagggcactggcaagtccagccttatcacttcgctcgtcaaaggcgtgtttgttacaaacaaaattcaaccggtcctcccccaaatcaccatccctcctaccctcgggacccccgaaaatgttacgaccacgaccgtcgtcgacacctcggcccttccccaggaacggaacaatctcgcgcgagaaatacggaaatgtaacgtgattcttctggtatattccgaccactatagctatgagcgagtcgctctgttctggttgccctatttccggtcgttgggtgtcaatgtcccggttgtcctgtgtgccaacaaggccgacctggcgactggtcatagtgaaacgcgagtggttgaggaggagatgcttcctttgatggcagagtttaaggaaatcgactcatgtatacgtacgagtgcccgggagcatcgtaatgtcaacgaagcgttcttcgtttgccaaaaggctgtcacgcacccgatcgcgccgctgttcgattcgaaggaggcggctctgaagcccgctgcagtagcagctctacaaaggatattctatctctccgacaaagatcgcgatggatatctatcagacaaggagctccaggattttcaaacccgctgctttaacaaaccattgaacgaagcggatctcaatcatatcaaggacaccattcagaaagcctatcctgactcagttacggagtccggcattgactgccaagggtttattcatctgaacaaattgtactcggagaaagggcgacatgaaacagtttggatcatcttgcgagcgttccagtacacggacaatctctccttgcaggagaaattcttgcatccaaagttcgaagtaccgccgttcgcctctgccgaactctcgcccgaaggatatcgattctttgtgaacctctttcttttatccgataaggacaatgacgggggcttgaatgaggctgaacttgcatccttgtttgcccccaccccgggcttgcccgcatcatgggccgacggttcgttcccatcctctacagtccgcaatgaagcaggacatgtaacactgcaaggctggcttgctcagtggagcatgactactttcctgtctcctaaaactaccctcgaatacttggcatacctgggctttgagccctccgaccaaagtgatcagtctattactgcagcgttgaaggtcacacggccacgaagaaaacgtcgccgccccggccgtgttggacgaaacgttgtccaatgccacgttctgggagcccctggatccggaaaatcggccttgctcgatgcacttctttcccgtggattcagcacgacctaccaccctaccatccagccacgtaccgcagtgaatacagtggagcttccgggcgggaaacagtgctacctgattttggatgaactaggtgagctcgagcctgctttgctggagaaccagaccaaactgctggaccagtgtgacgtgattgcgtacacgtatgattcctcggacccggactcattttcgtacattcctgcattgttggcgaaatatccccatctggaagagctcccgagtgtgttcattgcgctcaaggccgatctggatcggaccacccagcgagccgagcaccaacctcatgaatacacagctatgctaaacatgcctagtccaccgctccatgtgagtgttacgtggaattctatccaggaggtgtttgtccatattgccgaggctgccatggagcctagcaccgctttcccgcgtagtgaagaggatgtggagggcaaatggatgtcttggggaatcgccctcggggcggtggtttgtgccggtgccgccgcggtgatgatctggcgccgagttggtagcggaaattagggtcttcgttcatattctataccccatagttcaatgtgcaaataaatgtataaggatctcaagagttagttagttaactagttatgtacctcaattgactataatacttagtcaggcacatggccggctcagccggagttaagccggtccccgccaggcacgcggtctcttctccgctcgaacgtttaccccagacatcatttcccttgctgatcctcccctctcgcgcctcaacttgtatttttgaaatctccaaacctccgaacatcgagcctaatctcagtatacacatctgatcgagtgcatatatacatttgtgattgtcggacctattgcgcacccatatcgcgcccccccccccccccccccccccnnnnnnnnnnnnnnnnnnnnnnnnnnnnnnnnnnnnnnnnnnnnnnnnnnnnnnnnnnnnnnnnnnnnnnnnnnnnnnnnnnnnnnnnnnnnnnnnnnnnnnnnnnnnnnnnnnnnnnnnnnnnnnnnnnnnnnnnnnnnnnnnnnnnnnnnnnnnnnnnnnnnnnnnnnnnnnnnnnnnnnnnnnnnnnnnnnnnnnnnnnnnnnnnnnnnnnnnnnnnnnnnnnnnnnnnnnnnnnnnnnnnnnnnnnnnnnnnnnnnnnnnnnnnnnnnnnnnnnnnnnnnnnnnnnnnnnnnnnnnnnnnnnnnnnnnnnnnnnnnnnnnnnnnnnnnnnnnnnnnnnnnnnnnnnnnnnnnnnnnnnnnnnnnnnnnggcgccccccccccccctgccatattctgaaacctgtccatcgcttcccaacacataagagcttgcagatataagatcaaaagaggaaagtctgaataaagtacatcgcagacctggcatcttttttgcacttgccttatcgggtccaaggttgctctgtttgtcacaccagatctcagcccgagttcaaattgcgcctgtaccctgtacgagtgacgactaatcatgttgtaagcacgcttgttctttcctttcctacttctcccaatctgctactttcactctacaagctcagccctgtgcccttactattatcaacgtaattcgagagaattgcatatctcttgaggcaccagataaccacaacacttgctgacaccagcaacagcgtgcttccccctcctcctccacgctataccatccctgtcgcctatgcggcgggggcggcaaatggtatggcggtccctgttctggaaatgaataatactattacccacccggagcgtggctgtccactgcaagttggcgagggtatgtgcgctccacgatcgctggtgtttcctaaatgtcctgcttccttcagaatatcagagatgtcttacattttatattgcgacaggaacctacacccttcaggatgatttactcctcgcaacaccgcctccccacccgtctgaagctcctatcatcaacccaaaccctcttgcaactctacccacaccccctaccactggcgtaaagctatctcttgttaccctcgaccctcgaaagaagcctccgactttcttgaagtcaggtatcacagttccccaatttggagatgaaaacccggcgcttgcggcgccaccggtggcagcgaaagacgcagcgaagcgaaggaagcccaagaacaacatcatcaagagcagttcttccttcgtttcgcgagtcattacacacgagacatctgccaagcgattgagcgaccgtgacccgaacggtgtgtttgcctttgcgaatatcaaccgagcattccaatggctcgacctcagttcgcctacgaaagaggagcatctcaccaaagttctcttcacgaaggcgcatatgctctgtcacgacatcaacgaactcacgaagacgtcatcacatttggacattgtgatgggatcctcggcgggcgacatcatttggtatgagcccatgtcgcagaagtacgctcggatcaacaagaatggtgtggtcaataactcacccgtcacccacataaaatggcttcctgggtctgagaacctgttcttagcgtcgcacgctaacggtgtgctggttgtgtacgacaaagagaaggaggatgcccttttcactcccgaggtgaacgaccattccgaacaagaaattggacgattgccattggacatccttaaatctgtgaactccaagaaccagaagaccaatccggtctccttttggaaaatggcaaaccagaaagtttcaagcttctccttttcccctgatcaaaggcatctggccgtggttctcgaagatgggtcgctacgactgatggatttcttgaaagaggagtatgtttgtcctatgttaagaggaccgaacgattactaaataacgcttctagggtactggatatattccgcagctactatggcggcctgatctgtgtctgctggtcgccggatggcaaatacatcgtaaccggaggccaggatgatttactgacgatttggtccttccccgagcgcaaggttgttgctagatgccaaggacacaactcctgggtttcgtgggttgcattcgacccttggcgttgtgaccagaagacataccggttcggcagcgtcggtgacgactgccgcctcctcttgtgggacttcagcgttggaatgctccaccgtccccgggtacaccatgcctcaagtagaaatcgatccagcattgtagtgccaaattctcaaattgctaatcgccaccgtgcagacagcggcgacaaccgtgtgcgttcggactcaaatgaaaccgacaagttcaatgaagatctcgatcagacgacgagtcatcccgtggaacccaagtctcgcacagcgcttttgcccccgattatggtaagcatttattgacagccaaattgcctgcttcagaagactaactgatccgtagtccaaaatcgtcggcgaagatcctatctgctggcttggcttccagaaagactgcatcatgacttcgtctcttgaaggtgtgtataatgaggttggttggggctaattaatactgacattttgacacaggccatattcgcacttgggatcgacccagcgacagcgtcatcaaatcatgatgctccatttgggatttacagtcttggaagccttgggggttaccaatcgagatttcagtcttttagcgtcgcgttttctactcctaacacatgatatttttttatgtcgatattaccttaccaatctaaatctgtacatactgattgtgtgtaagggctgttctatatgtcatcctagaaaccaagcgacggcacacttaactcgaggttctcgggtttcacctcggttttcactactaacaccgtgagctacccatctatttttctttcctatctggcaacagaattaatgagaatagagtaatggttaactcaaagatttgactgatagtataactccaaaattatgaaacaggcatagcatcatcgcatttctcattaatggaagggacataatcatccataggtccatagaccaaatcatcaacatcaacatcaacatcatcaagcaaaataaatgtttcctagtcaactagcccaaatttcacaatagtagactttatccaaaaagactaccccaaataccccagaactatctccaactcatatatataagttcccggatacccagctggccagtttggatgaaggatgaccgacatcggtgatttaaaggaccagcgcaaacagacccagaagcagactgccagaagggggcatgaggacggcagcagcgttcgaggtggtacttgccgactccgtagcagtcgatgttgtggtcgaagtagtcttgtgagtggtggtcgaagtagtgctcgaatgggttgcggtggacagactactcgaggtgatggttgaagatgaggtccattctatggataagtcagtccctgtttctttcatgtagtgggtaaaaacaaaatgctgtctcggaagctacgctttccgcctttactaaccaggggtagtggatgtgtgggtagaaagatatgtggtagatgagatagtgcttgatgtgatgaaagtcgaggtaggaagatgtgtggatgtagtaggtgggatagacgacgtggtaatggaaatagaagtagtcggggtagtaaaggtagatataatggaggatggagttggtgtaatagaagaagaagttgcaattgtagaaatagaagtaactgaggaaggagtgagggtggtaagcatcaaagtagtagtcaaggtctcggtgtaagaagttgtaactgtcaaagtagagggtgttgaggggaaataagagggcccttcaggggtggaagtataggttgaagtaatagaagaataaacgaaagaggtagacgcacttgcagaagagctagttataaaagaagatgttgtaggggtagaaatagaagatgaagcagtagagtaataggacgaggtagggctagacgcactgatggaggtgtgagtagcagtcgaagacaggtaagaggaagtagtcgaggaagaaagagtcgaagaagtaagatcactggtccacgcggtggaagaaatcaaggacgaggcagacgaagtttcaagcgcagtactggtttccttaccagagctactagcactactagcgatttcaccaggctcagtgactaggaattgctgagactgagccagaatgccgctagtcggagagaggaagttgatctgatatcccttcctaaattgctcatcagtcagtaattcaaatagaatgcaatgaaattgaacttacccatcatctacatccgcgaacgtttttgctttgacagtgtaggagcccttggaagagtctacatcatctgccacaattgtcgttgtcggagggtagacattctgattgaccagttcgatggtaaaggtttgcggatccgttctattaatattgtatttctggttagcaaattgccagtgttcataaagcactgggataactagcagcttacgagacggactgccacttgatagtaagaggcaggtcggggtcaatcttctcaccaatccggggggaagtgacagtgagacctgattcaacggttactatattgattgtattcccgcggacgatatttcatacctgcagctgtagcagccagaaccgccaggcagataatattcatccgcatattgattggcttcaataatatccaatatggggtgaagtattccaaggaaatagttgtcaatcttggaaggtcgggccgaaatataatattcgtgaggttggaggaagtcaaagccagtggcgatataagacgggaacatggtactttatagccccaatgacaatgacggtggtagggggctgtatctctcacggggtcttctcaaatttgaatggcaatctttatttttggactgatttgccgtgatgccttgatccatcacgcatcgtgctcccaggtgtgtgtcagagtacagaatagttaggtgacgaccacactttcttgtccccgtggtgtgaatctactagtgcgttgcagtcaaatggatcttgaggatcaaatgtgcattctgtagcttgcaacttcattttcagcccatatgagaatttttcgtcgactcaatccatgatgtacaacgtctggaattttgaccggccgcgcgtcatagtttttgtccgtatcgcaatggaaagatagatttcgtaatacattacttgttcatataactacttaacgcagccatagtcattggctagggcacgggacccctaggatgactgctgcggcctgtttagattcgataccgaatggcagggattcatgggataattgctcttttcaaacgtcttgagtgccgataatgcactagaaggtcttttagctataaaatgccctgggagattgtatgtatcaaatatcttagatcgattgagcttacatggaactatatattcagacctgtcaacacataccgaaagcttattcgagggcaccactttatggtcattgagtcttattaaatcgacaacttattagacgtgggacaacaactccgaaaggtctagctacatcgaaagtattgtgttctaggtactctcggtcgttatgagcgtaagtaggacaaaaagccaagggaatacgattttcaacctaactcccggctccacacacggaaatgagaagaagctggtaagcaattaactcctcattttgtttagatttactagtcagaaagcaatcccgcctccacagaggctttggtatttcaaaatggttgcctaggagaggtcttggagtacataagaagttgcacgaagcatgaacataaggtcggaacagtgcttattggacaactcttgggagatattaaaatagtccaaatggtatctaggttgcttgtcggaacgaattcttgtcttgactgtcgtaataaaaggtccccgttcaatcttgagtatctatctgtctgtgctctccgacacttccaccactgtcaggccaagctacgtttgggttcgcagtgcatcttgtataacctattgatctcaagagtctcagtctggtccttctagagttgagagttgtcgtcagcattctccaaagcctcagatatgacgtggaatgtccaaagggatctaaaagcattatcggtacggagtatagtcatggtaaatattagtcttacgaatggactatgaatcatcgagatttttattgtactcagtggatgatgcggaaagaagtctgcatacaatgaacatcaagacataatttcaagcattgtattgatcacctgtcacatctaagtaggtagcacgtagaatccacattctagatagtctaactaaagcggaaatttttcatgcacgataaatgcaccttacttttccacttcaatccggggaacctcaacgctcaaggacactgcgaccaccgtcgacagtgatcctattccgcactcgaatgcgagcgtacgctgttccgagctggacaacgcgatccgaagtaggctcatctttggcccgagtgctgtctgcagaggacgagccttcttcactaactggccgatcggaagaggtgacacttgaagcctcctcattctctttggcattgtgctttgcaatgtccaacagcgctgttggacagaataccagagcttcaccagtcggcaaacgaacaatcttgtgaaagatcgaggccgcggcgtttgcatcagatttctcaataccagctcccgcgatgtgtgactttattgccttgaaccaagctggcgacgagaagcgatggataatagtcacattgcacagctcgagaagtgacggtgaaagagtcggttcctgtgtggctatcaagacgcgggcggctagatgtcgctgctggcggacgacagatagcagtgtctccgtcagatctgcggcttctgtcgacgttgaggtcatgaactagaatcaaattaagtgtcagtataaaagataatagatgactcaggaaattaggaagggccacaaaccttgtgtgcttcatccagagcaatgatacgacctgtgtctcggcggttcttcaaaaacagggaaacggcgatgttgaagagagcgcatgcatcttcttgaccaacgaacgggcagctcaaatcaactattgtcaaactgcccggaggaaatttccagacatcatcaacatcgtgttgctttgacttgttgggacttgcaccaggcacagatccaggttcaaaaaatgactcgagcacctccaagcgcatattcaaaggcccgatttggcctttcaagaaagtttcacgttgcagaatatttctgaacgcactataattgaatccggatttcccctggttggctatagccatgtctcgaagaatcttcatcacaacctatgtgagtagcttattagtacgttttcagcttgaatgaaaggtgtgctgacatacctcaatgtaaagaggttgctcggctttgttgccgatgcccatcaaggtcttcatcatgccgatgttgagatccttttgtggcagatacaatggcttcaccgtcagcattttggaaccgcctgccagtgttttgtatgcctttttcatggcaaggtagttggtcggggagaccaaaacttggacaggaatgcctgaggagtagagataagctgcctcacacaactgcgtgctggaaaatgcagtgaaattgtcatagtgaatgactagtccagccagaggtgatgctagcttcccagctggggaggatgcaatcaatgcattttccagaaggcaggacagggtatgacttttaccacttccttgactcccacagatgaaggcagaccaaggcgctgacacgtttgcatacacaagatcatcttgtgtcggtgtgttgctggaccggttacgcagaccaagcagtccatactgtggaaatgtgtctctctcaagagcttgatcgctatacagacggtcggtgtccaggacctgacaagcagagagtgagaatagaggtgccgttatcagttcctcgtccaagcgggtgttttcgtatggcgatgttttcgaggaaccagtgtcccctttgacaagcttcatatgctcacctatctccaaggtattcatagaaagttggagagactccataatgtaagctcttgatggggatagtgggagctcgcggtggagacaagatgatgagggttgaacgagtcaaaaagaaggcaggaaacagttgaatttaaatcaaaattctagaataatctaatgtcaaacatcacagtaaacttctagaatgcctctgcgatatgtttgttccttctatcgctgtatggatttgcaggactgcattatcatgcaagtgggttactctactatttgcttcatatctccgatactctgatagtacaaggactcctatttcacccctggataggaaattgagcctaagggtataaattagaagcctcaagatgatcatcacggcccaggggtgttcccgaagccacaaaagcttggcagcggatgcatagaagaaaacttggacacgtgacatatacgtaagaagaccttgtgatttgatatgcttcgcttcgctccgcaatcatgttcaggggagacttcctcatcatttcaaaattgcgtgttctctctagatcattatggcaaatcagacgaacatgttccctgcaagtgcctctgacattttgtcgactcaaccacacgatggctggagaaagaatcgaagcacagagcttaccacggtatcatgaaaagcattactacccggtaaaaattggcgaggtgtttaaggaccagtaccgggttattgcaaagctaggatacggggcgtatcccactgtttggcttgcctgggatcagaggtttgcaaatcctacttatcctatctgtttctgaatactgagtattcacgcactctttagggcagagcagtatacctcactcaaagtatgtattagccaaggtaccgactcttccccgattcttaacgagatcaacatgctgcggcgcttgaagagattcgcggataccgatgaaggcgaccatcccagggtggggtttacgcgtcttgcagacgatatctttgaaaatgatcaagcgtccctacatggccgatactactgcatcgcttcaaaacccgaaggccagagtattcgcatgttacaggaggcgtttccaaatagtatcctgcccaagcttctggtgaaatccatcatacactgcttgtggttttccgtcgactggcttcattcagtctgcggtgtcatacatactagtacgttcaaatgaggtagcggcaccttttgcatctcccacttactaaactgtgagcagatatttcacctcaaaatgttctgatgcaactcgatgatgatagctgcctcaaggacatcgagagccaagagtcacaggatcctagcgtccctataatgacgactgatggagcggctcccgtatacaggtctcgacgagctaagatgatggagcttttaggtgacccgattcttattgattttgggcaaatgcggctagcagaaggacagactaaccaggattggtggatgtctgatttgtataaagctccagaggtcctcttaggcctgccttgggagtatcctgttgatgtgttctctatcggtgtcatggtaagtactagtacacctaaactttgtgatactatgtctaactcaggtccaaaaccaatcagacacttgagctcacggaagggaagaacctattcgaccccattgaccgagtcaacaatcagtatgttcttccgttggcactggcccagtatatcggatatctgggtcctccaccactggagatgattcgcaagagtccactattttcagcatattttgatgaacagggtaagtctcccttgaaccctaggcttcacagttgagcttaccaaagcttttttataggcaactgggtgtcggagccccccatccccaaaactactttggaggaattcgtcactaccatcccaccaggagaggaaaaagaccggtttctccggttcatacgcaagatactaacgtgggatccggaagtgagggccgactcgtatgagctcatgcaagacgaatggatgatgaggcatgcttcagagcaagatctggtggaattgaagaaccagctgttttcataggatcagaatgggcgaacaatatacgtactgtttattaacagagcgcgttgaggattgctttttaataatatcctggctcaagaattggagcgcttacatgaaatctctacctagaagtagttaaatcataatcaagttttattataaaacaggaccgcccagcaatcagatgccgggtgttcaaaggcttgatttcattgctcagatgctttttctttggtttttttaacttatcatgtcctaattctgagatcttcatcttctaggtagaagatataaagaggaagaaatgacagaaaactggaaatatgcaaggcaaatatgaggttgatcaaatttttgtagagagaatgtgtcaacatggtctttcggtgtggcgcaaaacaaatgtaccagtctggtcaattattgagtcccagttcttccatagtcttctccaaggtcgtcttcatgaactccttcataaccaaatcttcaccacaaacggactcataaagaattttggaggtgatgttgacccccatattcatcaacttactgatgagtacgttctctctccgaaggactgcataccgcaggatggacccaatttgagtaatatcataaccagtgtcaatgatcaaatcaatcagcctcctatcaccaccaacgagcgcagcgtggagggtattggggatgaggttcgaccagcctgcggtggggatccctcgaactgtcactccgatcttgtgaccttggaccaatcttgatcgtgttttctcggggggatcgtctgggcgtagatctggagcgaaccgcaacacgaactcggaattttcgtcattcacatccgcaccctgtttgagtgcatacctgacaacacttactttgctgtgccagagtccctcgtacaggatgatctgggcagcatctttgacggtgagatttcgatcgccactcccaaggaaagagaacagcgccttgagcacgggtaaatgaccgcgagccgcagcaatcttcagaggtcgtcgcaacttgaaggcacccgtgaatgcgagagcatcgctggaaagtaacaactcaacgacattgacatggccatttcctgcagcctgtctcagtggagtttcgtaatgttcatccaacaagttgggattgacgcctttctcaaggaaaagattgacgcaagacagtgagccaaattcggctgctgcggtcaatgggtgtgatttggggtgccgtgggatgacactcaaagactcgggtgcgtcgcgatcgatcaaatgagacctgaatctatctcgccgtggaattttagcgccagccttcaggcacttgtgtatggtgccctccaggcctcgcttagctgcccataggataatatagctgtgttcctgtgctgagcagctcttgtatagtttctcgtcgaacatgagggcgaaacgcgggctcgtgcgaatcaaggcattgcggtctttctgggaatgcagattcttctcaatcatgagaatgagctctgtgggtagaatatcaagcgacatgatcgctgtcgccagaggcaatttcgaagtactgggtgctgaagatgtgacagtcgagggaaagagaatcgagatgaagggtttgtaacaaagatgaaagaaagattggctagaagaataaacaagttgccaagcagagaaaggaatccaagatgagatatgagcgggtgggagatgagcacttgaggttgaggaagagagaagaaagttgagtagatagggattttgagcagataaagtgcgagtgatagtaaagccacaatcacaaggaggaaaatcagatgaaggtggacaatgtatagcaattgaggcttgttgcgtacccaggtggccttgtttgtcaggcgtctcccactttctatacccaaggttgtccttgaggctgaattggccgtaacctacggtttacctagaatccaacttgtttatattattcctattaataaacaattgagcattggaaacatttgaatcaaagagatatgtgctatgagtcgaccttctaccttagtcctatgtaaatgaactacttctgttaccattagcaattcaataagaccttacctatataatatctatgggttaagccctcgactactttctaataccgtggattgttcgagaatgttattctctagcatataatccctcgccagagacctgatccgccagcgctattaatgcaatctccaaatcaccgggtccatcgacttcaacattcgtcctagcctgattataaggaaggtattggtgtgagttgtgaatgccacgagaagactgggtgttacgcagctctatcctgaggggacaaaaattgcattcgcctgagcagtcaatcctagccgtaaattcacactcgcctgttccagctctttgggtatattcacaacatcgcgggtcacaaagtcaccatgatagtcaatcaaggcggcttccaccattgaccgcagttcgggatctgcagtaacggcccaagctgccgagagacacattatcacgtatcctgctccaacaggtctgtaaacattggacttctgagcatgttcgagagtttccttaacaagagatttcgattctaccatgcatgtatagtcactgggatccaatgcctggagaatgcaattgaaaaatgtcgtgattgcgagaccaattccatgggtgcggagataatgtgctctcaagatacggcccatgaaggtttctgtcatagtgagcccggacttttcaaattcgactgttcgtacttgcaattcgcccaggatcaatttgcatttttcgtatattggtcggacttccatcgtcaatagcatcaaatcttcgccatcgcgtatagcttgtttgccgcgtctcattagaactggggctcgcgctagacatcgcaaaatctggccttcgggttgatcttgatcaaagtcatttttgactaaggaatcccactcctcggagctcaggtcgacagcatcattgtataagccctcgaataacttaggtatatgattagcttaggcaagaaatgtggtggagtcgtgtgtggcctaccacgcttccacgtaaagagaggaacaatttacgctcaaagtcatcgcgtggcccaaagttctttcgcgcgtgcagaatgctggcggccccttgcgcatgtcctgatatcatttgcccgttatttccgatgaatgtttggcagaccaaaagtatcatgacagcacatagtgtgctggaagcactcgcctggactgggtggtctagatagactctcagggtcttgagcgcatatgaatacttggctagtgtctcagccgaaaccgattgaccggtgcagaagcctgcgtgggcagtggttacagcgtcaactgcgtggtcgagtgcttcgttgctgccgagtcgtcggggtatatcttccaggaaagtgccgaaagcccaccacagattgtaccggaggtcagtggatcgttttatggcgccgacgaacgaattggtcaacgacatcatactattgccaggacatgcccggggtatttcaaaagaaaaaattactttttctgttgattttgatcttgatgtgagagtcatttgaccgcttcgatttgatttgggggaaaattgttgctctttgaacttgaatcgttgctgaccggaccccacacagctcactttcagacgaagacatcgtccacactcaggttgtttctcgtcacacttggcatattattaagattagcaacgtgtgatatagtcttatggcacgtacctttttcttctgcttgcgacacgcgtcacaggcccgacctgttgggacgcccggcatggtggggtgaagacctgagtggagaagcggagcgtggatctcaaagcaaacactggaggctttcagtagcgcgtctatattcagtgcggaatacgccgtagacagctacaaaatcataatatattgcactaaaaaaggctctaagcaactaggttgaggttattgcggctgcccagtctaaccgcttcgggtcaaatgtaccgctcctcaaggctgagttgtacgtcgctgattggccggtttattagctataataacaaggctgaattgctcggtctaacccgatatgaacctatagcgcttcacgcttcattttgtggagcatcgccatttagcccgccaaaagctacgctatgtgtccagatggtcttacggagcgcatgagtgagatatatatttgatcgtcatacctatcctcgtgacatccgatattgcacccttatttacagcttagcttgttcgagagggctcagctttctcaaaggaggccctcctctgcttccgtcacctgccatcggccccttcgagtcacctccctggggcgggttcatcctccacttttggcgcaaagcttcaggtgctttgttctcgaagcagtccgcgatatactggcccaggatagggaggaatttgaatccactaaaaccaggttagttaatataaagtcttactgtgcaaagtgatagttccatcaacacttactgtcctgcaccaccagtagccatgaataggccctggatggttgggtggtggtcaataataaagtcaccattaggggtatccgtgtaccagcacagtcgacggttcatccaagggcggtcccccagcttagggaagaactgacgcaatccctttcgcagcgattcatcggcatcgtcgggcagatatccagtggccgcattgctgctttcgagctttggcgatgagagtgacttctgaacaccgtccacattgacaacgatatcagttgcatatccgtaaccgtggcgtgccatcttgagaacatttgtgtctggtgtgggcgggaacgagaaaacaccagagctcatgttaatcatgaccgggatctttctcatctcgagagcctcctcctcggtcaactgaatgaaaccaacaggctggccagaggaagatgccacatgacccatgtttacaagacggttggtccacgctccggtgctcaagatcacctgtgaagcaagcaatacctggcctccaacaaggttgacaccaacaacgcgcgaccccaccctgcgcagggagacaacagtaccgcgaggcccggcaatgatggaaacgcccgcgacagtacacttggaagcaagcttctgaatactgcctgcggcatcagcccatccacctttcggattgtgatatccgttcatgccggaaaagtctgcttgaacactagggtaaagtttgcggatatccatggcgtcgtcgagatcgtctaatttgccacctgccgcccgaatgatagtcttagatttctctatatatgcattcttgggcgtttccgaaaacatggcgaatcccgattcaaagtattgatctttgtactcggtggtccatccattgtatgcttcccgggccattcgagagtagattgggtcggcatagtcagcgcgaataatgcgcgagatgtcaacgctgcttccatctgctgatggtggtacaaatcgatcgacgacggtgatatccgtatatccgcgcttgttgagttcaagagcggtcgaaagaccgaagacgccggcgcccacgatcacaatggagtctgtcttagctgtagtcattttgaagaacagattgacagccagagggattttgtcaaattgcaatcggttggaggatttcccaggattataaaatgcagagggtgtcggtaaggaaagccggttcagtaccgtcttggcgtccggcaaagtcggatccggtccgtgttccccggatcggaggtagatatgcatagaatgtttacattctaaactcacgttgggttaacgcttagccaatcctcaaacgccctcccataatcttgaagctgcaggaacaaggtatcaccgccgctatcaccgccgctaaagtccatattgggatctcccggaagcccggaaaagtccatcctcggtgaggtctgactcggcgtttgtataggatcttcagtctgttcaggtgggtaggtgacgcactcgggagccactgtcttgtgacctgatatcccagcagatccaatcaaagcaaaatcacgttcggtgatagcgccagccgaaggatccccggagcatccgacactgtctttggcaagttccgggccaaagatgtcactagcaggatctgatatattgctcgcatgggcatatactaaaattttccataataattgcaagttcacagaccacttctgacgggagttggttcctgctggggcggtgttgtctgtcataaggcctccaggggaaacgctgtcccggagttgttggagttgtcggacctagaagtgacatcaggacaggtgtgccaaagaaacagcttggaaaaagaactaacctgtcgatcaatgtgtggccaccgacaacccatattgcgtaggaatctaaggcatttctcaaatcccgtttgcgcctttctcttaaaagcttcatcctcgacaaaactatgttgaagatagatcgtagcgacaattgccacacattgccctaaagtcgggtcagatacctcgaagcttttggcctcgataagctcaagaaaatgaatgacccagcccgagtggaaggtcagctgctcgaaagaattccggaggaatgactgaggcattgtcctccggaagttccgaagtcgcatagataaaagaaacggatggtttactaaacaaggcaccgcgtgccaaaccaactggaagaatagccatgggctccaatagtcacgatgagcctgaagttcggcggggggatggtcttggaaccgacttgcatgaagtcggaacctaagtggcatgagactctcatgctcacagtgtcggaaatttagcatggcgtactcagaatttggagaccatgggggatgagcgtcaacgcctacatggcttgcggcataaatacatgccatcgcccacagctcgcttgtgtaaacactgctaccattgatgccaatatctggcttggagtcacagctggtaccataggcgatctctttgttgaaaatcatggttgccaatggagagacggtttgaccaggctctgcaagtaagtccaagctgtctccaggtggatgtagggacccctggaggttcctaagcatgacaatacttacatggcagagcttccgctcatcgcgctcagtttccaaattgcttagagactccaggccatttattctgaggtttctcatcaaatatgtggcaagtgtggtataagaccccgcgcgaatgatatgacccgctgaacagatggaatacaatgttaggaatagacacaagggcacgggccgggattgctttacctgtgaactccagcatacttagaaggcatagggtctggatagtagatagctccacagtacctgatgccaaacgcatcatgaccatctgagaggccctttctgtttttattttgatctccagttgtatatcctggtcaatgatccctggtcttttgaaacggactccaagagcttcaattgcgagtagaagctcggggtcccgcttccccagggagactagagaagatctgtgggggaataacagaaggggctgtgcgttacaaaaggtcagataaagttcagcatctgggatcgcaggtgatccagctctatttcatttgttaatgaatgtctcctgcgagtatatcccaagttgaactcacatagaaaagcttgccgggggtggaagctctggtatctgagggttattctcgggaacaactggcgaagggaggtgatttgaggcaggtcgcctacgagttcaatcagccaaatggaacgaaacagcacggaaatcagaactgacgtgatatattccaccaactgttccagtttcccctcaatgccggaaatgcgttgctcctatgccacattagaatttgcttaggtctggacatcaatgctacttaccatcatcttctgcgagtgcaccaggccttcatctacaatctcagcgcctgcatatacgcattgttgacccagtcgctcgcagtacgagcaaatcggtttctcccctgggcaacgcgactttttccggctgcgggaatgtcagctccaattggctctcagcttaggacacctgaggttcaagctcaccgacatggctcacaagcctgacggactcgttttgatggtctttcatcttcaattgaggccattttgcaaatcatgataaaaaaaaagtttgacctgaactgttccacgcgggtaaaacgacgatccaaggcggggaacggctgtgggtccgaaaacgatacatatcaagtacaatatagcctccccagcttctcatctatattcctctatctacgctcgatgggctttgactgtgagaagaagaacagaaacaacacccgagggcacaattcagtgaaagacgtgtgggtttggttgagacatcttcgggcactgtcacaataatcccaaatgggtttcaaaagcgccaaacttgggtgtttattctacactcattcgagagatggtcgcagatatcagcatgatatccaattgcaagatcactttcctcttgatcatgagctatcgctatccgcccatcatgaaactcgaagttgcgtacaaagtggacccgtattatagatcatgcgcgaatgtgtactccgtacacggcgtgctatacatagcactgggatgtatatctgtgacctaaacagtgtgagactgttcaactctgcctctcaaagataatataaatgcaaagtcgtaatttccacatagtgaagatctacgatcatgtgatctgatctgccactaggctgacgtcggctccgattccccaggcttttggccactcctcctcatttcactgacaattctcccagtctcggcgcgctttgcattatttcgaataagcatccttcaagattgagggaaacttgaaagtatcaaaaatgagtgacgcctacgaacgcgagcagtatgtccccctttctccaccttgtcccatcggatgtcgctatgaaaggagttatgcatcgatttgaatgctgattttgaaacaggcagaataatgcgctcctcaattccctctcctcgaaggtctcagctctccggtcggtgacgattgatatccatgataatgcgcgggatcaggacactctcgaccatacggtatgtcttgatcaatctttcgctagtccgataataattgagggcatgtgtttgctacttgcagatacctttgactggcgcctcggtcgggttaacttgcgactgacaatcttaccttcttagaccgatgtcttctcctccttctcgacgaacctcaaaggtagcgctactcgactcacgcggatggcaaagcaaggcgattctgtggccgtgttgaagattgcgggcatgtgtattgctgcgggtgtcgttctctatatcattcttggatggatcttttgaaggattcttacgtctttcgaacctgcttctccctcgtcaccctttacccatgtccccctcgatactcgacacccttgctggaacgagactcgtatcgaaaatacataatccgatgctatcatgttattccatcgtgctgggctgtcttcgtcttaccgaccgcatatgtgtttgactcgatttcaacatgacatggcaccttggtttgcagtgtatgctgtgccccaggatttccccgtcgttctcgatatactcgtcgttctattttcgggctgtgcctgttatagacattgttcctaagagcgtcggccacgcgactcccaccgcctcctttgacccactctggtcagccctgaacccctaggttctcttgattgacgtcttatgatttgcaaattggcccaagacttctggttctggtctcttccttggagcagccgactctaagtctcattgcgacttgacattttcgcttcttcccacctttccatgtcattaatactgtgattactcgtgaacataatacatacttggagccagtctcgctggatctgctcagccatgctctactatctcgttgcgtaattgaagcgcaccatggatcagctggatatatatactaggtggtaaatgcaatccagtggcacatgttgacatcaccaccaagtggtccattaccccagcttaatatatttagatcaacgcctagatctctacttaaaaaaactctaatcgacgatcgtgagcttgagctcatctgcaccacggtcgaccgacaacactaaccaaaaacggaaaccaggtagtatagacctcggatacaatgagaggccaattcggatttttcctactccggtcttcttgacattagttacatgtagcagtttactatcaaatgaagtgcatttataatgttgaacacttgctctattgtgtcgtgtgccacatttccacgtgtcaatatcacagggccgttttcggccaacatgtcttggaatgccaacgtaagttccggtaaccaatctcatcaaatagtatcagacttgcagtttattcgcaatcggtcaaggccacttgcctcattggaccccattgtttccatggccacgacccgatacagagggtgtcatgccatcacggcagcaaccgtcaccctcggtaaatcggttctcattaaacagtcagtaaacttagccgttgttaactagtgcagatactaagaagggaacattcttcacgggaacctgccactggtaccatagtactctcgattggaacattatcggcaccaacagaagctacctctagctgtgaactcattcatcgagatccgggagccggtctctggtggacaataaggtaaccttcgatgcaatgtatagccaagctgcacttccatgtgtccggcctgcgcttatatccttgttgccgaggtagcattgggattctgaattcgaagccggctgtgatggatagccgaggagtacatacccatgacggtattcaaagcctaagcgaaacagaaaccagctctcgttttcagcagccgggtgtagtcgtctccctagcttacattagccctcgtgggtaggtagctgcgacatactccgtagccgatgatatgaagtcgtcgggcgttctcgggtatgctttgacaagatcttccaggtttgacttgcaattgcacatgttctgtctttggggatgatggatgtttagaatatgagaggattgaaaaagcctcggctctgttgacatgaagtccgatctatatgttgtatatgatgtgcatcacacgccagatctagaccacgggaacccccgaaccaaaaaggcccgaagaagaccctgattgcaccgctatgtgaataaattccgctgtacaattggcccaaccgaggccctcgtaagccgtaaaaagtcttttccggatcttggcaggcggtcgatccacgcgatctcttttagttcccgctctagacattgcaacctcccctggcgatcactggaagatagctggtcatactctactttgtattcggcatgagaactacgcaaaaaagatatatagcacttgttctgctgcgcgtggatgcatgtaataagtacttttagtatgccctgtttatcaggtttcatagccgtgttttcttgtgttttgtgttgtttctttcggttttatttggtgggtcagatctcttacgatgtctggctttagcaaatactattggtacaccaagacgcaaagaccccttgacgtgcttcttatctagccaatcttgaaaaacattaaccgaagtgataagctaagcccccagggtcgaatgaggcgtttactgatgttctgtaattggcttaacttgctcttggacgttgaacatggaaaatggcctgatgcaaatcatcggaatacatttagggttcaagcttttacatgcaatgctagccgtatatgttgtacagtgcgttgagcggtgtaacatgcctagtttaagattccgacagtgaatcactcacgatgacgacatgccttcaataattacaccgatgtctactccgtacctgggtatgtacttccaaggttatctgcatttacaacatacgcgtaaacaacgagtcccacattattgacttttcttcggcatgatgcaatccaagtggacgttctggaactcaccgaagataatttcacagtggagagtctgtaaaaactcaccgtcgatgatctgcttggtggggccgtaagaaaatctttgaaagttggtagagtatagctctgaccctagtcatgttgagtgctttatagacttcgaccgtcctagccgagacctcgtgatggtgtctttagccaaaatgaatctaggctttcagggctggatcaaaagattagattagagcgggtcgcacgccataggaacgggtcttgtccagttggtatcaaaaggaaaaaaaaagataaaaataaaagtcaaaaacaaagtttcagcctaaatcctcacaccgagaagcccagtataaacacggcgaataacagcgcatatactcggggagcttaaatcggcacgcaatcgggattccgatccggtgaagcggaaattcccgagttccatatgtggaaggcatcccgatcccagggctaggcctgcagtcggcttgtacgatcgggagcaggccgagtgctggctttcatgcactgcactttgtatgtgtatgtacgtatggagtatatacatgttacatgaaacacgaccgcagaagtgggtcacataaggcaccataatcaacagtttgtgtgttgtttgtccgagatcttatctatgtttggttttacccttccaaggttaggtgaaatccctcacaatatatctgacccgctttgaacctatcacgacgccacgggccttgacagctaggcggggtctggttagtataggcggttcccgctcttaccgcaatgctcatcagggactctacaatatagtgatgtaagtgttgggttacagtaggcggttggatcacagatatttccgattattgccggtgagattaagataggtcaagcttagcaggtcaaagtcaaaggtggcttcatgcatcaatgtgcattggggattttcaggcacggtaactacagcttacaggaagagacgatcgcatttgaaactgtatttgtcagtgtataacttatctgagcaatatcggagtggcggcagttcaatgaattgagaaagaccaagggtccaagcccaaggcatattttttaacgagtggcgcgatcgagaccctagtagacaaggattatgtgtaccgtgactggttaaatgcagccttgctaactagtatactttgtagatctcctatttaccatcaccaaagtggattttttagttgacgatcaggttctgaagtatgaaataacgctgttgtgtgactccatgggcatacataggtacgttgacgtgtgcatcttcagggatcttgaaaccatgcgggaagggcgatcccgaggtatgtacggagtatgccgtacaacatcacatggcatgatggataagcgtatgggtaaaccctagacgctatagttagaccggggtgagttgttgaatggtttcggatgtccttcgtccatgtcatattatttggattttgttctggatacagaatcccttgcatttgaaagtaaagagactaaataggcatcaaatagtaaccacgcgtacgtactttgtaccttgtagggagtaactatgtagggtctggtatgatagcgctgacgtaaaaaaactagacactgatgggttttgatgtgcttaaccggttaagatggttctaaggttcttcacaaatctcacaaatcctttaaaatcctctaaatcccacttttgctccaattcttatatttctcttcattatatgccaagccagccttacatcgcgcatccgtgagcctatttccatttgagattagtcatttcgcatctcggcactgctaaaggccccaaaaagaataaaaaggaaaaaaagaaaagaagaaaagaataggtcgccggaacggcacaactccactggggacccgtgagtcggaccagtcttgcgtatctggccatgttccggtagatcagtgatagagaaaaaacggaaaaaataccggtgccatacgccagtacgcagtaacgcagtacggacggagtacacttactagccttgatctctttactcttgcctcttctccttcttcatatttttattccctaacttcgtcgacatctccgcccattgctgcgggcaatttccaaatggctctcagcttctttagtagtggcgggagcgccagcagcgccaagtacttcgacatcaggtgagtgggggaccggatagcccaggcgagcgacatatctgacttctacaggttgaatgatgagtatatcgtgttccgtggcggcgaacatgaagccgccagtgcgcatctgcggggcactctggtcctgtgtttgtccgagccgctcaccattaaacacctccggctacagctgacgggcatgtcgcgagtttggtatgtgtcgcattcctaattctgaatcaacaccactaacaagccatttgcgcagctggcacctcccctccagcgcagccgccggtggccgaaagtcatggcgtgaacgtgtgttctatgagaaaacgtggaaattccgggacctacccaaaggaaaaaccgaggtcctccctgctggcaactatgagtacccctttgatgtggtacttgagggatccatgcccgagagtgtggaaggccttgccgagacatgggtgatgtaccgcttcaaggccgagatcgggcgcaagtacgtcaaggacattgttgcgcgcaaaccgctcaggatcatacgaaccctggatcctagtgctctggagctatcacatgcaatggtaagtggtcatatcggcctgactgtcagattcttactgacaatcctcccagtccgtggacaacatctggcctaacaagattgaatactccatcagtaccccgacgaaagccatcgtgttcggaaccgctatccacgtcgatttcaaattgattccccttctcaagggtcttcggatcggccaaattacgtcacagctgatcgaaagccacgacctcaccctcaatccggaagaccccgattccattcgcaacacatacaagaccacaaggacaatcttgagcgacgagcatgagctggatgagaataacattgagatcatcgatgaagcggcggaaggataccaatgcaagcgtatcctagacatgccgcagacattgacccgctgtctgcaggatacagacaccaaggggattaaagtccgccacaagctgaagttccggattcagctgcacaaccccgacggccacatcagcgaggcgagtaatagtagaatccctggccattcttctgacaggctaacatctcaatgcagctccgggctacgcttccagtttcgattttcatctcgccacaccttgccatcgacgacaacaacaaccttcttgggcaaacccctcaatctacccggatcgccgtcgatgagtttgcgcaccaggcgcctcccctttacggtgagcacacatttgatcagctgtatagcgagctggatcccagcggctatcgcacaccaggccctgccagtagtccgggcacgcctttcactcctctcagtcgcaacatatccacagagaacctcgcctccatgaacgccctgaccaacaccgatatctcagcttcggcactgcaccatcgtctcacaaacctgaacgcaagtccgctccaccatcctatcactcccggtgcagtcactcctggcgagggcctgcatggatctcaatccccaacagacggaatcccaattaatcgccaattgggtgtctctaatgactacttcggaacggcttccggatcgaaccatggcagtccagaactctctcgtcggccatccgacgaagtggagcccgaagcccttccctcgggcatggcaactcccttccacccccagtacgacgaggtagagactctcagtcgggttcccagctattcgactgcagtgcgctgcgccgtgcgtccccgtgactctggtctccccgattacaatgccgtgattgctagtagcctccccacgctaccagtcccacagtctccccaacaggctcatatccgcagcggccgtgcaaccggaccgggaactcccctagaggtgcagaatcgctccggttacttcaattctcgcggcaccaatgctgacgatgaggaacgcagacttagaattgcgcaagctcgcgccagagcatgagatgtggccacggaatccttcgatccacccatgatctcccgccttcactttccatcaaaagttctccttctgcatcggtgctggacactgagacccacgcgaagcgctctatcccttaacccttagccattttctctcttcatcttctccccccatcatgttctttttctacaagcgatcatggtccccagcattagctccccttttcaagcctcagtcccagtcaatcgggcacttctcatccagcattgttctgaatgtttctaccgtccatcagcggcaacttcccatctcttcttacttctcattgccttttctcccaacatctcctttcctctggcgttcgatcatagacgggcaggaatactttcatagacggtcacgggtgttttgatctttctttcacttttttttttaccttacgaatgagatccgatatgaacgagctgcatgacatttaaatatgcctatcagcacgagccatgcatatgagcctttgacgcatgtacttaattactttggtcgacgagatcaaagtcttcgatgctcaacagattttccatctttactgatgatatcatatcccgattaggaaattagccaacgatcttaggtcatcaatgaacctgcgggcccagcccggcccaggtggcatgactctgcttcttcggtcgaaggtcaaaggtattgttcacttgagatagacattggaggggctattggtacatggcttttgccactttcgattatcgacaaatttcatgttcttcctaggctctagtgagtaggtctggccagtaccctgttttggatagtaagcacaacttggcgcctcgagttcatatgtatacattgtagtgtagagccaaggtattgctacatttacgttcgacttgacacgataaggttggaaaacttgaatatttgggtggatatgaaagccacagcatcgagtacccagagtaaggtcccgaggtctaacaggttacaagggcacagtgacctcattgacatttgtcgatcggttaagactgcactctcgccttcatttttacctacaacagaaagataatatccaacatagtggaaactgttggcccatcaattccgtcgcgtaagtctgctcgtccgcaatgatcgatctctactgactagtccagccatagactagcgctcccccacccatcggccgtggtctcacaccagccaccgatgcgaacatccctataattcgttgtttaagccacattatcagtcgtcagctctggttttgacgcggataagataacttcgacttcggttgatcattgtcgacgtcttgaattaggccttaccccgccgtttctccgcgaccatgtccactccaacgagccccgcggatgtgaaactgcctcagcggtctaacaccgtgagcagctccttcactcgtcgtacttctctgagtgacgatgaggctattcccgacggtgatagcaatgaggtttgtatccatggtgtcctcgaagaaaagaagtatattggactgacgatgtatttgtttccagactactaatctcctgcttgagcgtctccgagcatggaagcatatgtgcggatatctcgaggattacttctctgctaccgccaaagtgcagaagtcccagtccaaggactacgagaagatcttgaaggtcagtggttaattcctatgggtgatacccggcactgacgaagaatgggaatagaccgtgaacgaacccctcaaggaggcccaccacttcagtaccagcggaggcggcgtggctggtatgtttgagagtattcgctgcaacacccagggcatggttaccatgtacctagaaggcgaaaagaacctaaagaccggcgttctccccaccctcgagcgtctccacaaagagatcaagaacaagtccaaggagctgagctctggtgctagcaagggagctaaggccgtcgaaaaggcgcgtaacctgacgcagaagcacatcgagcttctaggtcagaacgccgcctgcttcgacgccgccgccggcagcaagatcgagccgcacaatgacccgtacctcctcaagcgcggcatcaaccaccgtctgaacaaccaagtaaacgaggagaacaaccaccgccaggatatcctcgccgtgcagaactccttccagcagttcgaagcacacgtcctgcagaccgtgcaaggcaccatggagcaattccacctgcacatgaacgggcaactcgagcgccagcgcgccatgtacgccgacatcctcggctccgcgcagcgcatcccaccggactttgaatggatgaacttctgcgtgcgcaacgacgcaatcctggtcaacccagactcgcccccgcgctccttctccagcatcaccttcccgaacatggagcaccgctccacacagccgctcatcgaaggctctctcgagcgtcgctcgcgcgccctcatcaagggctacagcacaggctactacgtcgtcaccccggcgggctatctgcacgagttcaaggacaacgacgatttccgccgcgacccttccccggagctttcgctgtacctgccggaatgcgtcatcggctccattgacggcatcaagttcaacgtgaagggcaaggacgtttccagcggcaaaatcggaaacgccttccacacgaacaccgagcttagcttcaaggcccacacccccaacgacgcggagaagtggtggaccgttatcaaggaggctacccgcggcccggtcgccgctgcccctgctgtggcacccacgctcgcttctcccacggcgacgtcggccgcccctacctcgcctgctggcattgctagccccgcccgcagcgtgtccggccagggcctgccgcccacttacgccgagaaggagatggagaagaccgaggctgcacaggctgctgctgcccctcctgctgctgcccctgttgctgctgcccctgctgctgctgcccctgctgctgctagcccgactccgggacttagccgcacggctagttcgtctagccacttctacacctcgcccggtggctccgctgtggagaagtcgtgatataacctctgtctcgtttaggcatatatatttaagctcttttggttctgtggactttacccccccatatatactcaaataacgcatgtgcatctcgtcagttgattagggtgtagcgcccattcatccacccggagagcgaaacataccttgtcgactggatatatacctctaatgaatttctttccacgttaaaattgcaagaatcagatatcagcgctaactggatcgaagatcctttaactatcaaatacacaaagcaggcagagttgtatcgtcaaatcatatcatagcctatgctggaaatacacatgggcatgggctagctagataatcccagcaagcttcgcggcatacatgttcattgcctagtatcagaaatcctcaggactttccaagtcattcagcttctccccgaggaaacgtcctagcgcggcgcatttagactccagcgcaagcaagacggccggcgaggcagagaggttcaggctggccagacgcgcaagatcagcgctgcggtcaatctccaactgggggtctccgtgaccgttgtgaggcgcgtccagagacgcaggtgcggcagccagtgcgcgcgatatatcaccctgtgagtcctcaagcgtgggagttccattacctacatcaggtacggtgtcaactgcaagggagtcggcgttggtgccgccgttcggctccagtgcgtctagtttggatgggccgacggcggccacgaggactttatccgcgatctgggttaccacggccacggagtcgtcaagttcgaagacgatcgagcctacatcgcctagagacatcgacttggcggtcacgtaggatgaaggatggctggctgggttgacgcccgtcaagttcccgcttgaggctgacttggcgtagcatgtgtaggcggcgccgtaggttgcgctaaggttgcgcagttggcgcgaggagagggaggagccgtgggcgaagacggcgccgtttgttgcgaagacactataaatagatacagtcattaggtgtatcttgtggtggaagcacagctggcatacatgatcgttgtgatctctggcggggacaggttgtcttccaagaggtcgcttagtgcctccgcgtccagcatcttaatatcggggagaccgggaatcatggtgtcggtgttgtcctggcctaccgaaggcgtgtattcctccacctggttcgagggttcctcctgcagtgatacgcgatttgcttccgcaatgcaatctttcggtggtgtccacgagcagtcttccgggaagaagaagcagttgtcgctataggcctcgtcgtgatggtcgtattcgattggctcgtcggagtagtccaataggttctgagcaaactttgtcttgtgacgggcccagtaaggcagaaagttcggttcgaagggagattgggagataggtagggaaaaagttgtcgaggagcaatcggatattgaatcagagaagggaactggagaaggttcgcattcagccatcttcacacccatggatgcggactggacacgcagagacgacaatgtggggtatgtttaattcccgcagaaaggtaaaacgaataaacagagggcacgagggaagcaggtaagctctcatgccatgggcttggcaagtagatgagagggagtaagggaatacgcagagattcggatccgtcgactcgacgcgcattggtccaaatacaaagtcacgatgattccaatcgcgtccgatggtacacaagaaaaatcagagcaacagagctttatgaggcctggtatgaccagcaggtgtcatgaggtgtgtgtgaggcggctccgcaatgggagcaccatgatcgggcaagtatgaaggaagcgtgcacatgagcagagacttgattgggagaggtaaaggggggatacatgaaaccaagagctaagcgcggcagtaaaagaaagtcggaaattaaagaaaagagacgggatgcgacacgaagccgggaatggaggccaatggtaggaaagggatcaaccgggagcggggggagaaaggtctgaggatcatgcaagaggatgttcacgaacctggtctgcgaaatgtggtaatcggggaattcgaggggttcgaggggttcgatgttgggagttcggaggttgagttgggaggaaggaattggagatcaacttccccgttgatgtggagttcccggacgttttaacaccgaggtatatatacggctgcatacatatgtcgacctaatagtgtagctatcttatgtgtcatttgattgttcaactcggaattgtatattattacattcctacattgcagttcattattagccgtacctaaattgttgattatatatgtacttgtactccgtacaggtttcagattgaccacatgctggacgcctagaagtattaaaagtgatagactaactcacagaatctaattggtctcagtcatatagacaatatgctcctgattctataacttataagagctacctaggtataagagctatgtggcacaacgtcatgtgccccacactctcctcacggctgacaaaaagctcctttgcccctctgtctcctcccccaatgttcgctcgtctttctcctggggtcctcagacaaagatcctttgtaccaatcagtaggctctattcagatccagctcacggcccaattattgaccagttaccaggatccctagcaaccatggcttccgatccttccacctataagctcaaccgttcgtggacagtacttcaacatttttcgacacaatcactaacacaatgggcacattatagacacgatgatgcgggtcaaagatccgcagcgatcggtggatttttacaagttccttggcttgaccttggtcaacaagattgacatgcctgaatggaagttctgcaactacttcctggcgtataacggccccgcctctctccagggtgaccgtcactggactgatcgtaatgccgttctggaattgactcacaactatggcaccgagaacgaccccaactacagcgtggtgaacggaaacacagagccgcaccgtggcttcggccacattgccatctcggttgacaacattgaagccgcctgcaagcgcattgaagatgccggctaccccttccagaaaaaattgaccgaaggccgtatgcgacacatcgccttcgctaaggatcccgatggatactgggttgagatcatccgtcgcgccgatgaggatctcagcaccaccaccgaccctggtagctatcgactgaaccacaccatgttgcgcgtgaaggatgccgaagccagcttgaagttctaccaggaatccatgggcatgactttagtccgcaccattgagaacccagagaacaaattcaatctgtatttcctggggtaccccgcatccaatcccgatattaaggagggtagcaaaaatggagtggcggagtgggaaggtctgctcgagttgacctggaactacggcaccgagaagcaggaaggccctgtctaccacaacggcaacactgagccccagggtttcggtcatatctgtaagtggattatcatacaacttctaattgtttctacaaggttcctaacttgacataggtatctccgttgacgacctcccggctgcgtgcgcccgctttgagtctctgaaggtgaacttcaagaagcgcctgactgacgggcggatgcacaacatcgcatttattctagatcccgatggatattggattgaggtggtgcagaatgagggaataaagcgcacttcaaactggtaggatatagaaatacaagccaatgcatgtatatcaatttccagtcctgcttatcctctaccggaccctgccctgccttcagaacattttgatctcggggggcaagaaatgacggcttaatagcatgattggttcagaaccttggaagcaagccacccgaccaaactcacatggatttaattgcacatatttcagccagaacgccatgaattatgtatagtcatatgtaacccccccttgggccttggctaatgggataaccctatcctcttttgatatacgtacctgcctgacttttgaataccgccttcctaatatggtgcgtccattgattctgccactactacgtagtaggtaccgagtacggagtatttgaattcagtttatagtcaccaacttttatcatatcaactacttcatcgttaacaactgcttcaaaaaccgcttcaacaactgctctgtcattatcaagggattaaaacatgtagggtcgaattagcagtggaggggggtcattgtaaccatccgctaaacgatattgtggggtaaggtgctgctttgggtatatcagtctgagtaatcagtgccatagtgagccctcattggacctccgcttcatcacgtggggtatttgcgcagctgacggactctgaaatttacccagtgagcctgactctgagcgcccccgtaaaagcgcagaggaaatatgtcacggtgacctggcccagctaatggcttgacaatgagaatttcgagaatttcgagttttgacgcgggatgaattcatgtgatttcacccatttcgtcttatttgcggggacacatcgccacacaccattggagcaagccacaacctcgagcttcagaactcttggaagaaatcctcgaggacgtggcctcgaaattataaaccatgtcggctgagccagagaaaacgaaaaaggcaccccgtaaacatgtcaccactgcctgtgtgccatgccgggagagtaaaatcagggtatgtgctctgagcttgagtcaaaaaatcctaaatggcttcaatcatctaatgtgcctgctaccagtgtgatggagccactcctaactgtcagaattgtcagcgaaagggaaaagaatgcaaataccaacatggagacgacaagcgcaagtaagtaccttgtttaatgtgcggaagtgcctaagcgacgaggcagacctcataggcatacaccacttcatgttcttttgctaatatgaactagagtatctcttcgggcctcaacggagctgttctccgcccgcattgaccaactttgtcattttatccaggagcaggggctggtgcccccgccaatgaatccagaggatgaggctggcatgaacagggttttagacaccctccagatcccgcgcggattccctcaagcctcagtagtggccgatgaaaagcgaccggcagatgatccaacggcctctgggggctcaagcaaatctccgtcccaagatccacctgtcgtaaatcccaagggacaaaccccgatcaccaatttggttgcttccggcgtatccccggcgcaagatactatgtctaatggaaaggcaccgtcgcccgagggctggaatccctttggattggtaccgggtgcttcggacaatcaaaactttgtccattggggctttactttgccaacagccgaaagtttggacactatttacgccaatctcaacggcgggccgagagcctctgcaatgcctagaatccccctcaacgcagaaatgagtccggatagctaccagcttggcatggatatggcccagcagccgggtgttctgctaagccagctaccccacggcggagaaaatgattcggatagcggcgaagaggacgaagctgaaaatgacgttattgagcaattgtcgcaccgaattggcactttgaaaattgcgggtgatggccatctgcgtttctacggtgccacgtccaacctcaatctggtggatgtatctgcgacacagcagcggcagcggcctgacgcacggactgtgcgccacgatggtcaggatattttaaatcatctccgggttggtcaacctgtggaccaagccctggaagatcatctggtggagctatatttcacctggcaaaaccctagtacatacattgtcgacaaagagatgttcatgacggcacgaacgaaatggcgcaatgagctcgatgatactccgttctactcggaggttctaactaatgcaatgtaagttcacttcatttttcggtgctgaaggaatttgctgacttgttgcaggtgcgcgatcgggagtgccttcgaggcacgctatcaccccacattcattactttccccaagtctctctctgaattcttcgcagaccgggctaaggcccttctggaaattgaactcgactctccttgtgttgctactgtccaggcccttgtcatcatgagctgccacgaaggcgcatcaaatcgtgatgctcgaggttggctgtatagcggtaggcatatatatcttgaagataggaggcaagtaacgctcattggctaattgctttgcagggatgtctatgcgacttgctttcgatcttggtttacacctagatatgacgacatacgtgaacaagggcgaaatcacccagcaggaggccgatgtgcgccgtgcaaccttttggggaagctatgtggcagaccagtaagttttcgtggttttcataccgtcaatatctctaacagtaactagtttctggggcttctacttaggccgcccgttccgcatgaacgccggagacataggtgtttcaaaacctggatctgctctttatcctgaaaaggaacaaaactggcatccatacggccatcaagctgctcatgggctatctcagaacggtctgaggaacccaatggagctaatatgcaggcaatttgtcgttctatgggagatgatatccccagttggtcatattttgtatgtgacttatgcatattatccagcacagtgctaacaagcctttaggtatggatgttccgacatctctcggcacgacctgcaaagaatctgctatcaagtgacggaagatttgtttgcctggaaagcaaatcttccttctagccttcagattgatctggacgatgatacatcgccaatattgcctcatttgatgatgctccagtcagtttgtttcaatataatagatccccagaatcatactaacagtctcttgcagcatgcaataccaccagatcatcattttcttccaccgcccatggctttccaaaagctatatccagccccgcagccctcgtcaaggccccgggtatcaccatgcgcggcgcatgtgcgtggagtcagccaccgccatcgcacgactcctccaactcttcgagaaacactacaccttccgccgcatgaacaaccaagttgtagcgataatattcagcgcagcgctcatgcttctcttcgtaacagtatccagttctccaatgagtccaggcaaacaaagtgacagcccgacatacccccgcagtccggaaatggtagcatatctcaatttgtgcttccgggctctcgatgaactgggccaatcattcgacaatgccaagcgcacccgcgactaccttgttacactccagcgacgttggcaagcaaacatgcgccgatccggctctgcggcgaaacgtcaaaacagcagtgctaatctggcgtcgctaggctcgcagaagccgtctacactgcacaatagggctgccaatgcccaaggaatagatggctcacggaaaaaatcccgtttatctgtttcagaggtccctcccaatatgcagtcaatagcacctgtggcgaccaaccaatactcccgcctctcacagcaagccatgcctcctcatcaccaatatcatcagcaaagctcttatcaacaacaagccccctttcccgtccccgctcccgtccccgttcctgattcccagctaggcgatctagactggatccccaactcagacatgcgtcttttgtccgagactcaaactagcaacgcactgaatggcatgggccaggttccttctccttccttcgccgaggaccctagcatgctctcagaaatcgcagacattgatggatggtggacatcggaaaattacacgagaacctcaatgccaccatgaaatcattgttggatgaataattacagcattgcagagactcaatccttcgagtctgtcaaatttgtgttgcctggaagatagaacggacatcctatgatcgaatgatatacaccactccaggcatggagggcgttcacataaatgtattattatttccatctttcaaaactggggcctttatgaattctttgcatgcgcaatttcagatgtaacttcgatgctatatgcattgcaaccgattttaatctatatcctccaatgttccttggaacacattcttgaaccagtcgcccacttcctctcccgcattattatcagtactccgaatctgagataaagtaactctccgctccccaacccccttctcccgaccccaaaagcaagcccgccgcatagtagagaccatctcatcagcctgtcgagcaagaaccgtagacccatgaccaccatctctaggcttcttctttttctttggagagagagaaccagaagccaattcagcaccatcctctctctcgaacacccggacccaaggcaaagccatttccaatcgcccaatgccatccccaggtccagaccacgtatccccactgagcccataatccataccatacggcggccaacgcgaaagagcctttcggcgccgggtaacagtagcgccaataccaccggtatcgtcggaatccatatcgggacactcccaggtcgacccgtctaatgctgcgtattgatcggcggatgtcgtgccccgcgtctccttcagtacggggacgggatactccggccccgtaagatactgcgggaacgtgggcggcacatcccggcccgcagagcggaggaagaggattggcgaggcgaaggagtcgaagcagcgctctggggttgagaagaatttcgagcgggcttggaggaggggcactaggtctggcggtgctgtggtctttctccttggctggcgcttttgcgtggatgctactcttgactttggagtggtattatcgcctgcctgtgttttggggtttgtgatagtgctctcgcgcgtgcagtactcatccagaccgggccagtcgcaaattggttcaacagcggcgatggctcggatggagcgcgcttcggtcagacccagcataagagctagagagcctccgatatgtgtgccgaagatggctagttgcgctgggcggaggtgagtttggatccagtcgaatccggccagtgtatcgtggactggggttggatatttgtaagaggtgatttgggggttgcttgatcccagagtttggtcaggggcttcagattgctcttgcgagatagagctttcaactgaagatgagggaatatatgttggtatctcgccgagacgatagttgacggttactaccactgcagacgcagtggatgctaggacatgctggggtgaggccaaggagttggtatcaccagtcctttggtgatcaacttcactgatttcatgattttgaggtgcgctcgttgcatttcccagcaacaaaggtccagggggaaggtagaggattacatttgggccttctggagacagcctctggtgggcgctcggtcgcgtaattctggggatgtagttagcatatatcactagggcttataaaaatatacatgtgtactttagagaaatagccccattgtttccaagaggaagggaaattgtttcatcggtgcaatcagatgaaacggtcgaatatcgcgagcttcggaaacacgcgacggaaattcggatagctcctctgctgcgacgcagtaaaagggctataccacgggacgagtagataatacctcgcatagcactattacagcatgcacttgatgtttgataaaacttgtcaaggagggttgttggccttgctatccgaaaccaattgatgcctgaataatatggccatctccgtgctatcaaattgcttcgacgaccgcatgtctcatcttgatataattcattacaatctcagtgttatagcattctattcaggactaagctaatcatgcaaaaaagccaaattttcatcgcttgacaatttaaaatgaaacaaaaataccgtatgcaccatgctctaaataaatagatgactgatccaagagtccctccaggaatatgaattttgccgagaggcagtcgccgacgtcgccgacgccgcagggtcatctcggtcgagaggagcttcagtatcatcctctggcacagggcgcacaacctgcagactcaacatcggatccttggagtaaacccgcagtccgaccacacagacggcattccacgggtcaacagaaggctcatcatgacccaccgatggagggtggttcttcacacccgtctcgtcaggaggcatgtcgagatcgctgtcaaattcgaacccttctagtaattcaagatcaccctgatcaagagtccctgtagcaaaacgagcatctaaactggcccgcggagagtcggctctacgtcgccaatcattgtttgcgtgtcttgcgtgcaggccctggccgccgttgacgtagatgctcgggatagaaccgttgacgcggcggtcactgttttcacttgagatgcttgaaacgtcgatggcagaatcttccattggtttctctaccagaatttggctggggacataatcgcgttcgaagttgtgatcgtaggagctgccgctgggggtgcgtccgcaccttgctcgcatccgctcctgtcgggcgcttagcttttgattgcgaatccagtccttctgcatcttttccttaatctcgtctcgaagctttctccgctcagctgctttgaatcgctgctgctcccgcttttcttggtgtgtttcgcctaccagtccctttgcatgcgcgaggtcgtatgaaaggccgacttgcactagtttctctcttctcgtcgaggcaacctgacggacaatttcctcggtcgagtctgcatcttcgtggcggaaagctgtgatcttcatcaggacgtgatagtgaccgggatcaaggtcaatctcggcgttcacagatcggcccataaagtggctgctatggctgcgcacgagataatcttgttcgccttccttctgcaagcggaacttgagcacgaagctgtacttgccggctagtcctttgaaatagcgcgtatcaagctgaatctgtcagccactacacaggagctggggtaaatggcgcataacgaacctgggataggacaatgactaccggtccagtcttagtcacatccatcatgaatttagtgctgtgataatccgcggaccagggaacattcaaggtagtccattgctgggtaatggtccattcagctccgaagaggcgtgtccgatcgaagtgctggtatttcctgaggagatctttataagagatccagaagaactgggccaggtcagcgtattgagtgaaagtgcgatcgacgaacacctacaccatcattgccaaatttatggccaaggattttcatccactcgggtgtccattctttggatccatcaccccatgcaccgtgccattctttgcgaccccatgggttcctaggtgctatgagcctcttgatcatttcccttttgacattcatgcacatacctcagtcgcagtaaccggtggccgtcaatctcccgggcttccatgatggaataggagtgaccctccgcgataccctttcgatcccttggtggaccccggtaattaggatctaaccagtttgaaaataggcctgtcccacaaccaaacaggaattctgtgttgactttcataatttcctcggtccaaaagcggtccttgttcaggatattgctagataagacctcagacgtaacgcctccggtgagatcctcgatagcctcaccaacaaatccaccctcaatcgcggaatagtctccatgggcctttgcgaaggctttttctagaagaggtagccacgtctcattgtcgtcgacgcactgtgcgaagtacagggcccgcgggcccggctgcccgacccgcccggccnnnnnnnnnnnnnnnnnnnnnnnnnnnnnnnnnnnnnnnnnnnnnnnnnnnnnnnnnnnnnnnnnnnnnnnnnnnnnnnnnnnnnnnnnnnnnnnnctggggaaagacgggggcccgggagcctgtctgccagactcgccggtactcttcctccgtatcaatccgagttatgtcgtcccagatgggtcgctcctccacagactcatcatagtcagcagcgcaaagatatagtttgtcatctataatgcactgctgccactcgccgtctgatgattgaagtcagcatggttcccagtctgattgggctcggagcatacgcttacctcgatggaaaacaaatccataaatcccaacctcttgatcgcgagcaacacaaatcttctcgatgagctcctccttgttgcccatggtgcaaagcgcagccatgagccagcaatccccatcatatccctgccgcacatctgacgcggtaggtccgttaacaaagaaccgcggattttcaaaaatttcctatatgaaagtcttcagcaacctgcaatctgaacactccatggcatatcatttcgaactaacagtcactcttttcacgccccggggtctcatctgcatatttggtttatccaatccatcgagatagtgtctccggccagacttcaggtctagctcgatatcaaagtgtgggtccgaatatctctgattcatgcgctcgcattccttgacaatacggtcgacggacttttgacattcctggcgtgcctgctcgtacgacttgacagcctcgtggccctgaatacggccgctgggaacatgcttggcccgtgtccgtgcatatggattgtccggcagcaccgtatatactttgcccgggtacttggtgttgaattgttcccagaattgcttgatggattcctggggcggttgacagcgtgtacggggcggtcgactgtttgagcgcgaggagcttggtcctgctatggcatagcccatttcgtcgtcgaattccatgtcctgctgtctctgggttgttcttcgcttggttgggggttttcggttttttgggggggaggaagcacagaggtggtaattctcaggcggctatttctctcatatcgcactaatcactccgcaatgacgatcatagatgaaaatagaaacacggattctgttcttgttctaagcgctgggatgacattcccggattttcccctcacgcggccactccgaaccgagaacatcacctcagccttcattccctcgtattgatcagcttattaggcctgatcttcgtaaaagcgttcattataggctgaatgtgcattgtatcagcggacgaacgagcgaatctgacagcaaatggtgctttcggcccccacctcgattctcaggccctcttataacggccacagaaaaaataatgaactggaccagacttggtgatcttcagcgagtagagaagtgagaaatcaaggaatagaggaatagaggaactaaacccggaaaggatgcttagcatgtctcgttccaaagtttcgtggggcaatttttagctgacacgagatgactcttgacctaacccgaggctgaagaagctgaatacaatggtaccgtcacatcatttttcatatctgattacagggtagaaagggtatgtacgcctgttattcaagactaaaacacttcctatgcagtaagcccgccctatcactccccattgaacgccgaaagaggagaaagaaaccatgccccgagaacatttcccacagtgaataagatacactgaaaatgtgtgtaatcatcacactaatggaagccgttacttggaccacgtccagagtagtatgcggtgccgttacggaagtacgggtgtaagcaggcctgcttggccgatagtcggtgtgcagggtcaaactcgagcagagattccaagagctgacatccggcctcttccagcccgggaacaatctcaacgtcagggcgcttccacttggggaatgtggatttataatcggggaacgaggtcacgccgggccagatgtcttcaccgggcgtaccaaggatgctgcaattcgttaatacggttgaacacagaataacagaacaatgcttaccggaaaatcttgaagatctcgtcaatttcagagtcaccggggaagagaggcttgcgtgtacacatctcggcgaaaatggcgcccaccgaccacatatcaacacccgtggagtattgacgtccacccagcagaatctccggagaacggtaccacaatgtgacaacctgtcgattgcgttagtaaacaagcaattccattaatgcaactgaaaattcaatgcatacctcgtgagtgtaagtgcgaaggggaacaccaaacgctctggcaagaccgaaatcggccaacttcagattgccttcacggttaatcaacaagttctggggtttcaagtcacggtgcagaattcggtggctatggcagtatcgaatgccctcaacaagctgggccatgaatttcttgaccattgcgtcgcccaggcctggggttacaccccccttgaatccatcaggcaaaggcttccctcgcccaccgtcactgacaggcagagcctccatgtatttcttaaggtcgcagtcgaggaattcaaagacaaggtagagcttatggccatcggcatggacaatattcagcagctggacgatgttggggtcctgcatctccttgaggagggaaatctcgcgaattgcagtgctggggacgccctcatcttcggcttcgagtcgaatcttcttcagggcaacgatacggttggggtgattgagttcacgggccttgtagaccacaccgtaagtgcctgcagaccattgacgcgtgagttgggctgtaggtaacaaggtcaggtcggaagtacataccttcgccaatcttctcaattttctgataattatccatggtgcccgacattcgatccttcgctgctgttaatgagattaacaattggagaacagaaagaccagaatggggatttgacacaaattggagggatgttgccaagaagaatttgtaggggaagcaaggagaagaggtagctactacttactccgaggatgttggtatctgagaacagctggagcagcacgctcttcaaattccacctggggttcaaaaaagtaatttgttgacgagatgattgacaaaacacagtatttcaatggtggggagagaaagacacaaaacaaacaacccccgcgcccatcatagggcggtgaaacgcgtaccttttccttcgttgttcaactttctctttgacttcatatcttcgcaatggcccaaattaaaggtcttagtgcttatgatcgccctcctgatccagtgagactttgctacaagaaatatactaaaattgccttgtctgaggttgacaatgatccggggatcctcgacctacaagggattgattccgaccaattgcccgacggagtgacaatcgcgcagtatatgtgcagccaggatttgcgattggcatttgatgatttcattcgtggaagccatgctgaaacagaagaggatacttctttgactgaggatattccagtatacgcccataaatcgatttccggttagcattgtatcgcctcgatttagaactgacccagcaggaaaaagagcaatgcctgacctcctgataggcctcctgatgattcccgccatgttccctcctactatccagatcgaactgctctctcgcctattccaccgagacttatccaaccccgagcatcagacaaacctacacctgcactacaatgtcacgtaccccgaaaagtcggaggacacccagatgcccaagtccttcttcgcagacgatcccactcggactttccaacccaaagatcctcagcttcataagcccttgtcggttcaaagtttcttagagaaaaagctgcgctgggtaacattaggtggacaatacgactggaccgccaaattatacccatccggaaccccgccggagtttccgccggacgttgcaaaggtgctacgtgcggccttcccagaaacatcggcccaggctgccattttgaacctctactcccctggagatacactgagcgtgcaccgggacgtgagcgaggagtgtgacgtaggcttgatcagcgtgagtttcggatgcgatgggttgttcttggctagccatgatgacgggaatgggtgtgaggttattcggcttcgctcaggcgatgctgtgtacatgaacggtaaatcgcggttcgcctggcacggagtcccgaagattctgccatcgacctgtccaaaatggctagccgactggccatcctttggggagtctgttccgggaatgccgcctaccccatacgagatgtggaagggctggatgtctagcaaacggatcaacctgaacgttcgacaaatgacgaccactcaggcttccgaagagagagcagatcacgtttgaaagtggaaaattcagatgtcagtaatgtcagattctttccttggtccaaacatggacaatattctatcttaacctactcatgtacagagacagtcatgctgttccaatgagtctggtcaaacatcgcaatccaatgtccgaaagcgttgctaccattcacaagacactttgtctcccgctggagagcaattccacaaggtttttacctgcgggatatcaagcacccacccctttggacgaatcaattgcacccaaatagacattttctgctagaaaccagatcggctcgcttcattttgccagaagagtgccttactaagcatatcaaactttcaaggttcggaattgctcgaggttgctcgatatgcggaagagacctcgggagaccatactgtatctagcgcgtagtgctttatcatgtcagtaacagagaacctgggcatcaattacgatcaagatgaagcattgggctttcgtatgaatgttgaggggaaatgttattctctattaatatagagcagagggagcagagcaagccacctactgttccaagcgaatgcagagtacaaagaataacccccaggcgccttgtccgatgcttttctacaaatattatattccacgaccagtcagttcctggatgacgatgacggaggcgtctgtccagagggtgcagcaagattggataaatgaggcgtggaagatccccaagttttaccacctgcagaaggcggagcatgaccagactcggacgaaggaccagacgggtcttccgagccattcatgaggcgctgtcgcttcgccgcaggcagcccacctacctggggcatgccgctaggtagagcgccgttagacgggctgcgaggatctgcaaaagagtggggtgaagcgtagtgggtagatgaagcaggggtggaggcacccgcgacgtctgggctcaaagctgtggcagattgcaaggggcgcaagcgattcggatgagaggtggtgtcctcgcctgggcgtggaggccggacatcagggcttttctgagactgactttggtctggatcccctagctgactagggtttccgtaaccaaccccaatccggcccatgcccttatcgtgcataacaacacgtctccatttggcaaccacgctgtcgtagtcccatcgtgtcgaatcgggactgatgtggctctcttttgcgtctaattcccgtgctacctctcgtggtagggggagcgtatctggggggaacagtgcgaactcacgaggccactggcatgatccgaggcgctcgacctgcgcacgcaactgatttgcttcctgttgcactcgagcgagttgctcgtccgaggacttgcgcttctctgcctcccgtgcaaatgcacgcgtgatctccaattgccacgcatcgcgccgggtctcgtgggacagggaactccaatgattgaaggccaattctaagtgtcggaaactgatatcctcgtgctgttgtgcactccggtatatcatgttcggatccaccccgctattcccatgtcttgtgtaaggcgcagaagtggaggagtctgctgcgagttggtcggtctgccattgtgcaaccttggaacgaagggcttggcggattatatcgaggtgctcggctccggggggctgaaggggaaacgaggtagaggagggaaacggatgcgtcgcaaacaggcttggtgggggagggagcagctggagacacatggagggaaaagtctgagcttgaatgtcgaagtcgaacggagatagccggggccggatacgagagctaatgtttcgtgagcttgggggttagatacaaaatgatggaaatgagtcgacatacgtcgcagctttgatattatcaagcacctcgcgcagtgcgagctccagcgcccgcatcgtatccgggttgctggagctagcacctctactcgcatagtccggaagctgtaaagaccctgtgtgagactgcgatggcgtcattcgaggcccatccggtacgcgactagggttggggatatcgttgatcacccccgtcgcatgccaggtaggtgtgttgaacatcatgcgcaccggagcttcgcgcgacttcgatcccgagtccccagctgtaaatggctctgaggttccctttttctggcttcgttcagggctgccctcgttcttccctgttgatgttcgtgcctggcgccgggtgattccgctgcgaattcgtctgatctcttcgacgtcgtggattccgtcaggtttcttcttaaaaaggaattggtcgaggtgtcgacctaatgatgaagaggtaaatgcttgttggcagtactggcatttgcgatcctttgcagcaagactggccttcgactcgtcaccagcggtcgagccgtcgggggtttctctggagggttctatttcttccttcatggtcggggacgtagaaagatgagatgaatgaaatagatagtaagcttttcagcttataatgtcatgacatatgatatagtgcgaccagaagcagcaagctggtgtagggaaaattcaacgtggatgagagggaggtgagaaagatgaacaggaaaatgccaagcttttgggcgcggagctgcgcgagcaatttttgtgggccaaggcacatggagatttatctatgtcggacttattgatctactgatgaattgcatgtatatatcgtgtgaaaccacttcaatgctacctatgcaagtattgagatagtctctgcaatgtaactaggcccctcgaccaatagatcaagcagaatcaatgtgactgcctgggtgcatattgtacttcgaacaaatcagaatcaagaactgcaattgttatatatttgtcatgaccatagaaacttccctctaccttatcaagacacggacatcatgttggatcaatgacacacgcggatagggggaagtacaacactaagcctggagagtctagcacacgatgcactcatgcgcagcatggaagacacggtggaaccatgttcaaggacgagctttgctctttctcgtcttacgcgcactgagccagcgtttcacgtcgctgataccgtgcaaatacaaccaggagaagatgaaaacaacagcaaagttgaagataatgaatccccagatgatcccctaatggatgttagattaatctggcactctgaaggttagttaaaggggtatagatcacgatactcacataatctctccatttgtgcgagtaaaaaacattgaggctactagcctgaaaaatgtaacaaagttctagttagctatgctccaagtctgctggtcaagacattcagaagcgaaacttacaaaattatcaccgactgagtattgacagaatgagcacattccattcccaatgtctcggacatatccaccggatttttcggcataagacccagcatattcttggcagttcatgccaggtggagtgctaaagcgggattcttcgcgctcaatacaccgcacggggacattatgggtgatggctccaacaaatccctcaagcagatagtggaaaggcgtaagccagtacatccacgcttgccaaaaatgcggtattgcgacataagggacgacaacgccgcagaaggaagcaacaaaggtaaagaaagttggcacgagcaaacttgcaaatagcacatttggtgcaattgcagctatgaattgaccaaggccgatataatatagttcaaaaagcatcatcgacatccaaacgtagccggaggtaaacgagtcgcgcgggaaccaagttccccagtaccttttatatttctgtcagaggggagagatgaaatgccttctcaatagacacttaccagcagttgaagtaaatggacccggcaacaaccgagtatggcagttctgggatgattgtgctcgtcacaaaggcagcccaagagtagatctttgagttagcctctcgagattcataaaggcctcgaaaatgaatatatcgtggttggagttgctgtatcagcggtggggctatcgtcaaggtcatgaaaacagagaaaagtcgtgattgcatgtcgataaagctatttcccaaatgccagaatgtgaaggtgttgaaaaggccggtaaagatgtggagcatgaatttaccctagttggcaattaggcaagtcattcgggcttgttttttgagacctagtgacttacaaggatgtagtctgggatcctccagtaagccacgaatgcgcgcttagtgactgcgactgtttgaacatagagaggcatcgcgtattcgcgatcgtcgtcaaccttctggtcattttgagcgttgcgacgagaggcgattataccttcaaggtccccagaaagctgtttggattctggcgagttggcccatacattaccccagtcctgtcccttataatcgggatttccggctccaatgacttccaacatatactagatcgaatatcagtgagaaccaatacatccagctttataatacacacctctgccggattttcatgtggtgagcaattcctcccgccgttttgttcaaagtaatcaatcagcgtcttggagtcgtttccaaggggcccattataaacaacaattccaccgcttttcagtagcaagagctcatcgaagttctcgaataagacagcagaaggttgatgtattgtgcagagaatggcctgaccggcatctgcgagtcggcgaaggaagcgtacaatgttgaacgcggccagagaatcgaggcctgacgtgggttcatctaggaatagcaaaagctctggtttacttgctagttcaactgcaattgtgagtcgtttgcgctgctcttggttgaggcctgagcccatggatccaacaattgccccggcgatggaacgcatttctaataagtcaatgattgtctcacaataatcatacttttcttttaatgggacttctttcggctgccgcaacagagcggagaaccgaagagactcccgcacagtagcagtgggttcgtgaatgtccatctgctcggcgaatcccgtggctctctgaaagctccttgggagaggcctgaaaatattaatattcattctcaatgaaatactcaaagatatcctacctcccatcaactaagaagttgccggtgaccacgccaaaattgatgcgctgtgctagcgcattgagcaaggtggttttgctagtcagacattagcatcaagaatgaagtcaaccttgttacgtgcttaccccgagccagaagcacccatcaatgcagtcagccgaccaggcttgacataccctttaacattttgcaaaagttgtctctgtccacccttgtatggaatggtgtagtcaacgtcttgccatgtaaagattgccgtgtttgtagcaatatcccggactttttcatgaggtacactcgtgtcgccgttgttttcgttggatgctgcgccatccgcctctgtggattcctcatcttttcgggggccggattgcttgatgacatcttgaactgcttggggggcttcacttcttttgaacaccgtgaccgagctgccgcccttattaggtctctgtaattccattcccaacattgtcaagcagacgaaaaagataagccatcctgtaatgatgccgaaattccgccacaggtgagccctggagtaagtgtacgccgtttggatatacttgggaccatgaacgatcaactggtctatatcactgccttgtattgcacatgactggtgaccaggcacagcatttggcccatcaggcacaatgtagggcgtttcacatttgatctggagattgtggaactcgttggccatcaatgcctcgaatgcgtattggacagggttgatccaaatgagccactttaaccatgggtgcattttccacggtgggatgagatagcctgaattttgttggccattaaactcgaatattaggttccattctgctgggctcacctgtgtacacaaccaatgcctgtatggcgacaccagtgaggcgggtggctatatagtgttattgaagacttcttgattccgagaggtttgttccactcaccaacatccaatgaggcacatagagcccccagggcacgaaagaaggagtacatagtcattgtgagaatgaaaatgaaaagcagatttataaagaactgtgagggtgttcgagcaagatttgccatgctaaatccatcatcagtttgatccacgtaaagaatccaatgagactcacaagtatactatgatatcaaatagaacgacttgtatgaacacgagaggcacatcaaccacaacctgggcaagcgcatatgctgctggccggtagaaagagctagaaaagattagtcccatcattttgtctttttttttatagtcctcacaagcttttgtgtttcatcaaaattggtcggctcccaaatgctgctgtcagctctgccatagcaagcaatgaattgaaaagcagtataaggaacatcacaccacccctagtaaaaacgccagaacttgaaacggtgagccatatggagtctcttcgcatttggagaggcaattgcttaccttgtatcgggaaggttgtaaaatagactaccaataatgagagcttgaaaggttatcatactccactttccaatcaacgaatctctatcaccaatcattaccagaaattgacgatgtgtgagaatcataacttgtttgtagaatgagatggtgaagttttttcgtttggcctcacttcttgcagcctctctctcctgcctttggctttcgatatcgccctcaaagcttttcatatccgctaggttgctttggtaagtatcacttttgcgatatgcagcttgaaattcagctgcattccgaggaattcggtcgtcccagccatctttgacacgccgcgcataggggtcattgacagaagtcaaaaagtcgggagttgtccaacgcggggggcattcaaagcccagtccttcgaaataggcctttgcgtcctgggtagggccgaagaaagagcattttccctcttcgattaagatcaccttgtcaaaaaggtcaaataaattctccgatgcctggtagagagctactatcgttgaaacgttggcggtatttgttagacttcgcaagctttgaacatactctagcgctgtactggcgtccaaacccttggtagagttgtcccagcactgggtactagcctttgtaaccatagcttccgcaattgaggttcgtttcttctcacccccagaaactccacgaatgagttcgttcccaactttggttcccagagcatgttcaatccagaacaacttagctatggcggtcaagaatgtctgctggtattcctttcggctttctcctggtattcttgaggctttgtcgggggttcgagctttcaaggcaaaaagcagtgtatctcgcacagtcaaagttgcataatggagatcatcctcagggttgtacaagactgatagttttagttcggaatcatggtcacacagacaaggacacaccttctgacctatactcctttgccattttttcagagtctgtgccgccataccgcacatcgccttcaatgctttcgtagcccgctcgttgattgccaagcattttcaagaaagtggaacagccagagccagggcggcccagaacaagaagcatctcccccggacgaacacaacccttgatatgagatcagtcgggcatatctctaggggtgagaaatatactcacattgaaatcatctaagatagttcgtatcgctgcttttttggccccggcaccttttctgccccgagtgagtagttgcttgatgagccgtggtaagccgagaaaaatatccccgttggtgggttgtagagcagctccgaggccgacaccttttacagtgaggttcttccatagaactccaacatgacgtgttttctcttcttcggaatttgctttgcgctcagggccgaacatccgtgagatcagtctttctatctgggcccattcctctccctgaggatcatgaccggaggctttgtgtcgagatttagtacgtgcgaggccatcgtcagttttctttggcgccgtggaatctgcctgggtgtctgatgaggcagtgcgggttggcgtgtaagcttcggatggagacgaactggctcgcgaagatgaaccctcagaggaagaaacggaattttcaggaatgtgttctgggtttgtagatgatgcggactcgctttccatagaatggtcgtttgccatggtcgttttttgagactgagcccaggccttttgaggtatgcgattatgagacaacgtgatatcggatgactatatatgtagctgagcgcaacacgtcggttagcgacgataagtataaacagaatcactccgcatggatatcatgaatgtcaagaaaatggaaaggggtgtaggtattacgtcaagtatcattgcgaaaagggaactcggggtgtcggaacaggaacgaaccgcaatattatccagagcgtctcttatttgcttgattttgtagactgtaaacgagtacatgtgtcatgtgtagtgaggtcatcgcgtccggttctattatatcgtgcgattctttctttctgagcctaccaaccataaacttactaaatgtgaacaattaatttcaaacattttctactaagttctaggaggtcgtatcgacgtacgatgcatttaaatcccccgcagtttgagttgtctccgatcatgaagtcatcgatcgtacaatatggacatggatgtcatggagtcatcttgaatgccattagttctgcgcttttgatccttattctttggctgctggttttaattagtgtattttctcatatctaataaatataatcgccctggttgtttcccactgaacaagcttcgccgatttgtattcattactttttttgggggttaccattgctcttgtcctaagtatctcaaatccatattgttcatgtagttctaaatagattgcattaagaagaagagttgatggggcctaatgcctaggcaatcatatctaggcgtgtcagtatcagctgctttcgacccacgaaggttgaccgcttcgattctttgattctcaggctgatctttcaaattatatagcttttattttggaatgaagcacctcgtgcccggaaacataatgagcagtgctgtcagcattaccttcctacctatctaggaatataaacatctacggaattgattaccgacaacatttaccaactcgttttactacagcacaagagaaccctatttgtgttagtctaccaaacaggtgtgacgagagtaactctacaatcatgatctcgtcattctaggacaggttagtcaagcatatcagacaaatcttgactgcatttatcaatgcaaaagctagatagagcagcacgccatgattacagcatattactctccggttcagtagtgataaatctctagattccactctaggagcagggaagatgtatctctcaccctagaaaccattccggcttcttctgcggtgttcttgtgcagctttggtagcaatgaagccccatcgcgctcacagatttctcccaaaggtgttggactttttccatttatccactccctcatcaaagggtgcagtcaaagcccgcagcaagtatgtctccagccttttcgtggtattgcttgccaaaaattaatggcaggttcagtgctaagctgtggtgtgttgctaccaccacacctcctcttcacagcatctccgctagccgaggatgtgaccagactgaagtgaatggtcaagttgatgatcctcctcaatattccttcgacggcgcagttcttgaaaagccaatctcgactcgcagccaactggagggtcgaattgtgaaactctggaagaaagtctggctaggcctttatcagatcgatgataacgaggatcgataccatgtcgaacgactggaagcactttctctcggggccggcttgactcgcacataccgagttggcgagcttcaagttctcaggcgtcattttcttcgaagcgagaccaacaatggaattgcttcgttgaagcttttccggggtctatcactttcgacccttctatccgtgatccatattctggaggcttatgaaagtgaaattgagaacttgaggctgctctattccatcttgcgaaggggtcagctttcactgcatgagactgctgatcttgctcaaactgctgttgtcagaactgagtatatggcaattgcggagccgatggagaagcggatcagacagtatgatattcgaatgaatgtggtaaatatggatatctgcgatgaggcaatgggtttctatgagcgacaaaagggggaatatatttaccacaaggcattcccgaatgcgtggtaaatacggggagtttttggttccatcctgtcccgtttcacattgactaaactagtattggaggactttgagtacaatcagtataatttggatcaaatattaatgttataacttcaaggacgtttgaataaaaattatactccgtactcatgatgttattagacatggtattcacaagttgtcttaaattcgaggggcccccctttttttggctaatgcgaccctggactcagcttaccgccagccacaccgccctggtgtcgaactccctagcaagacagaattaaattgatgccttatatgtaaggtttgatatggcagaatctggcagaggggggtcccattaaaccaaaggggggggtcgaattagcaattagggtccttataacagtcccaaaattcttatagtacatacttccaaccttcttgcaaatatctcctcggggccccttgatccctcaaatgccgcattatagagaacaagttgcaattgcagcctgaaacctgggtgtgcacaggtgctatactaatccaggtacctacagggcttgagaatcaattcaatccatcttccacatcaccttcagttgtttaatagcatccccgtacatcctttcacgcacctgattccccttccagaaagagggctttttatcaaatccgtgaacagcatcctcaatcacaaacccgcctatactcgccatcttcccgtcttcaacgaacccaccaagtctttcccggaacgtatttccttcaacaagcaattgatcccacccacaagtatagattgccacagcaggcggatacgccgcatgcaacagagatgcaggtgccagaccaggcgaaagataaggatgcgacatatccacccggcccgtccccggccgtatcggtaaacccgcagcgagaagataggaatcgtcgaagaacttgaataaagaaggagaaatcatggatttttgtggggcgataggatttgtagcgtcacgctctttccgcgttcgtgtccagtcggtgccggcgtagaatactaccaaaccagccaacgctacctccccgcgtatcgacgcccagcgctttttctgtagttcatcgtgcagtctgaatggcattgctagagcgaggttcccgcctgcgctggctccgctgagcacgaagcgcgttttgtcaagattgtacttctttgcttcttgccatagccatagtatagcaccgacgccgtcctctaatgcgacggggaagggttgctccggggctagacggtaattaacgcttattaccacagcatctgggtaggcatttaccacggtaccggcccagcgggcatcatcacgagcatggccgatggagaagcctccgccgtggaagttgatgaggacgggacggggtgggcatggcttggtttgcttgcgaggatagagggggtttgagggtgcggtgaagaagtagagttggattgatcccggggctttgctgactgtggacggaatagcaattccgacgcttggtcctgggggaagtggccacgaaaggtatcggtctagtatggagagtaggtgggcgagcatgcgatatcggtgtgccttgttcctaagggcggagcgggacggggagggtgatatggatgccatattgtactgcaatgaaatgtttttgtacaaacgggcgaacaattgatgatagttatgtggtgttatatagatgaatgatgtaacttgttagtcactggacctgaatgatgcctgtcagatgttagtcaacatatcaaggaggatcttgtgtattatacgatttgagcgttgatattagaagcgaactgttgcagtaaagtgctaatattctaatggtggttgaggctgttttgtctccattcccgagtcgcatatagtaggtcggactccaagcttccagataaagagaagaatgcctggtcgtttataggtttcttaattcgaatttctatcccattagaaaagagatacggatcaatttacccattcttcacatctccaaattttctggtctgtgccctagacgccgggatcggcaagccgagcccgaatttgaaggtttgcacggagtactccggagagcatatgttgtacattatttcgacgtagttcgcgttatctcagagcagactacggagcagttaacctatttcatcggaaacctctccgaagcgtaatcggaaattccccacctcctcgtaggccgggatccctatcccccacgtcaacgacgtcggcacgaaagactacagccagcctgtgcatcatctccggtcgatatttgacttggaggatatagggcacgagaattctgctaaggtgctgaggggacactgtattcaagtcaacccttgtgttttaaactcggtatatccaacatttcagcgaattttctgttccttcaattttgagaccgggggggggggggggaatccgcagctcgacatcctacaaagcgtatcttgtactgggaatccaacgttcttaccagcgcgtttcgacagtgttgaaccatggatagtcagatgcattcgagttcggttgaaattaaatcgagatgggacaacaagtactgcagatatatatttcaccttagatggtctctcaccttgccaaacacaaagtacaacatatatagcgatggacgcaaacgtaggtgcgctggagtgaatcttggtattacacgaatggatctcctgcaactcggagagataacaatagctaaaatagtgtatacaatgcctgcctcgatcaccaacaccccatttgcaccttcccccacggtcatttgtcattgttttttttttcttttctccggatagctttgtaagactactcctcattcgatcaataccatgggtagaaaagatgcgtatgcatgtcaggtttgagatactataggctactcggagacggaccaacggaataaagagtacatcagcatataccggagccaacggtctcatctaccaaacatccaacctgttcttccacttgaccccttataagatggtatcctagtacagcgtttgaatgcacagtgtctacccaatcatgcatatagtgatatttactttcctaattcactatcatcggcatcaattgccaacgctggtggcgactttgaaaaatgcactaggacgtggcatctgttagtccacagtcaacgtagttacatcatttgatggcaatcgccgagtgaggtcacggcctaatcatctgcacctctaactggtagctcattaaactataccccgcatccgcagttcgagctaggacgagaccacgcgacaatttccccagataaaaagccaagacgccaagaagtgcatcgccagcgagatgtggaaattttagagcgatactgcccaatgccacaggtcatgggagcaggaagactcgggcgtataattttgcatgtttatcttatattgtacaacaacacgggtgaatttatttttgcagtactccgtacgatgaagtactccgtaataatctcaataatgacgtgcagccgctggagtcaatctcggggaaaataggaggacaaatcgatctttgtcccccttcaactcggcccaggccgttttcaaaccgtcggcgctggttgggcagatattttagataggtagactcgaatgaaagacaagaaccgtatcactacgggtaatttaggaagctaagtttcagaaatgattggctgtgattgatataaaggaccgagaatctactaattaccttagtgactgttgatccgggtaacggacataaagaagaaaatgcgacgggtgtggacgaaaaggggcaaagggcaattcccggaatgtgtgaatagattcaataattgaagatcacggggcaagcttagctttcaccatggctatactccgtacatattccgttttgcggaggattacagggggaaccccctttctccaccagcccttactccttcagggcgtgaacaaaaaagccgcagaacaaaaaaagcctcaaattcgatacatagttccagccagctggtattcgtgtcacacgcaaggcaggaaaaatgaaaatgatcagcagagttaaaaaaagcgaagacacttagtacgtaagtgaaacaaatcgcgcaaaaaaataactaattgtttcacaaagaatgggctccgggtagaatttgacaaaaaagaaaaagaaaaagctcgcgttcccgacgccgtagccggttcgggatccgccactaacggggagaaggatctggggttgtatcgcagaaatgcacatcccgaggcgacggcgacggtggccgataaaaacccatacattcatagcagaccgctcatgtgcgatattaattaggaatcattcttcataggctgtggtccaggccatcgccttcggcgttggaacgtaatatgcatggggttctgcctttggggcttggatctggagtaactgctcggagcctggctttgatctcattgcaccactataacgagcgattatcgtcgcccagcgaaaaccagtgaaaatagggctaggacccagcggcaatatcttctacccacccgatcatcctaggaggtagaaatataagcgctctgattggtccccaccgccgcgatcaatggatgcatgtggcatcatcctcggctggttaaacgccgttatttgctgctgagtcctgctcccagacaatcgttccgagtttgtagccgagcctattgccatccgggggtgacagggtgagtttcattttgttttcctttccacgggcaacacattccgatatcaattcgggttgatgcgagccgaaaacagaagagatgggggatcgtgaagggttaaggttgatcgacgagattatgtcagctccccgcgattctgagtgggctagactaggaaattcttagacgtatatcgattgggtgaagtcattatgcgtcattcctgtcgtccgtggctgaagaattcctagatttggagaggcacttttggtaaactcttttttacgaggttttaggaactaatgctcagatgattgacgaaatgcaaagttcgcccacgtagactggggtgtttgccgcaagcgtcagagcagcataaaagggcccctaaactggtctcatgcacctctccttgtaaactactcaggaaaaaaaaatccattgagttatttttgattctagaacttctatctggttcccactagtattcgccttcccggtcatagatccccttgttccgaatcaagttcgtgctcatttgaataactcgggtcaagtcggactgcgcctccaggtctttgcaacccacggcagcacttcatccccatccatcaagcgtgttcctcagctcggcgttcagccccgacatcacccgtggaactgtggagaaacactacggaaagtgcacgagaaccctccttcataccaagaccgatcgtgaccatggcctctctcggaaaggattatatacccctcgaccgctccaattctcctggtcctctggcatcagatttctctcaacaacaagtcgctaaacaacgcaacaataactaccactctacttcactcagaaatatggttgccacatctgtgaatcgcactgccttgcaccccggcggtgttcagtatgttaccttcctatctcactgtccatacctcatcgtcgctaactgtcttcacttaggcctagcaagggtcacaccgagcttgaggaggagcttcacgagactgctcacattgactacgaccgtgtctccattgtaagacctcaccacccttgcgctagacatttgattacaatgtccatgccgtctatcttgcttcatctactaacatcatttagattgctaacccctctgttcctgccctttacgaagatgctcttgtctacgagactggtactgctgttacctccagcggtgctttgagcgcatactccggtgctaagactggtcgttccccctccgacaagcgtgtcgtccaggaggcttcctcagaaagcgatatctggtggggacccgtaaataagcccatgacactggatgtgagtaaactttttgattcttgatgcgtgattacactggatatgtcattgtcctcattggagcacacccttgcagatgggcccgaggagatccacttggatcccttgcatatgcaccgggaggtcaagcttttcggcaagactctgtgcaaccttttgggttgcggtctctgccggataatccctcattgcctttccatcatcatcccagggaatatttccttcccccagtttcattgcccattacttgcccccctcgatttgcccctcggctttcatttgcggctccgcaatccccgcccttggcccgatgacatcacgtgaatgacgtcaacaataagaatggtgactaatagattccccacaggtctggcgtatcaaccgtgagcgtgctgtcgactacctgaacacccgtaaccgcatctatgttatcgatggttacgccggctgggacaaacgctaccagatcagcgttcgcgttgtctgcgctcgcgcctaccacgctctcttcatgcgcaacatgctgattcgccccagccgcgaggagctcgagcacttccaccccgactatgttatctacaatgctggctctttccctgccaaccgcttcactgagggtatgacctctgccacatccgtggccatcaactttgccgataaggagatggttatccttggtaccgagtacgctggtgagatgaagaagggtgtcttcaccgttctctactacgagatgcccgtcaagcacaacgtccttactcttcactcctctgccaaccagggtccggatggtgatgttaccgtcttcttcggtctgtctggtactggcaagaccaccttgtccgctgatactaagcgccagctgatcggtgacgacgagcactgctggactgacaccggtgtcttcaacattgagggtggttgctacgccaagtgcattggtctctccgccgagaaggagcccgatattttcaacgccatccgcttcggctccgttcttgagaacaccgttttcgaccccgtctcccgcgttgttgactacgatgatgccacccttaccgagaacacccgttgcgcctaccctattgagtacatcgacaacgccaagattccctgtgtcagcgacaaccaccccagcaacatcattctgctcacctgtgatgcccgcggtgtcctgcctcccatttccaagctcaccccggagcagaccatgttccacttcatctccggttacacctccaagatggctggtactgaggatggtgtcactgagccccaggctaccttctcttcttgcttcgctcagcccttcttggctcttcaccccatgcgctacgctcacatgttggccgagaagattaagcagcacaaggttaacgcctggctcctgaacaccggttgggttggcgctggcgccaccactggcggcaagcgttgccctctcaagtacactcgtgccattctggattccatccacagcggcgagctggccaaggctgagtacgagaactacgctaccttcaacctgcccgtgcctacttcctgcgccggtgtccccagcgagctccttaaccctgagaagagctggaccgcctccacttccttcaaggatgaggtcaccaaacttgctgtcctcttcaacgagaacttccagaagtactctgatgaggccacccccgatgtcctcgccgccgcccctcaagtttagagggttggagcgatggttaagaatttctttttctccttgtttcttgttcttccaaacaggatgaataagtcatttgcatggcgtgctgctttattttgatgatgctctttggtcgccgacgtctgccgcttgtatcgggacaagcggatggatctttattgatttccccccgatttgggttgtgctttttattattttttgccatctatctttgactggctgggagttatgtagtgatattaatgaaacaatttattacatcatagtcaccgcaatggatcatacctcatttctaaacttattctcaactaatatgtttttgtattccaatggctgcttcttgtagcatccatggtggtattgtttgatgatccctggttgacagtgcgctgccattaaaccctcgtcaacgacgccttggatctatttgcacctacctggttatttcggtcagccatttcatgattttacgatgttcggttagacgcgttcgcaaggcggacttaacaaatatagtcagttgggtgatatcatcggaaaattactacagtttgagtcttccgctaaggcatttggggaggatatattgaatgacttttggctcaagcatagaaagtgaggtcatcgccttcttcactagtagactccagctggacctaggaacctcgtcttatgtacggttggcctaacccaaagaccaatagtcctttctgaattctgaactctgaacgatagaatgtttgatttgatgtatttctctatgaatgcttatcttgcttgccgcgaagctatcgacagcgcaagtgacttttgggcgaaatcatccctatcctttggtagacggggttagcatgcgaagccccgtattgatgatggatacaactcaggtgaaacggcgaaggcatggaaaagccaacattccgacgggatgcattagccgtcatgatgctagctgatgaaaaagtggagtagggtggttgaggctcgtcgatgcagttaggatcacggtacattgggtcttttcggattgtacggtattcgatgtggtggtccttggcccacgaggactttttctttgaatactctagagaaataagagcagagtcagctttaagaaaagacctaggttgtaccaagactgaaggtacctttctagattgaacgcaaaatgcaatgtaggtgataacgggtatgagaggtatgcttttgaagaaagaagagacggggagctgagtcaacaccaacattcgaaaaactgtttgtcgctatgcatatcttgcccgcccaaacagaccatcgttgggggtaaaagaagtagttgtgaatccaaacgggcttgtagtatttaaggtattctcaggtttggcaacttttttttgcgctcgactttcggcgtctttccgttgatattccctgttgatggcatccttggaggaaaggagttgagagagtgtcgaagctaggtcactcataaagtccccagtgtcttcttggaagtcggcaaaatcgttcctaaatttctcatgggacgcggcaataaaatcgcataaatctttgcgagcaagatcgctcgataggagcgtgctgccgtagataatccgaatcgtatctgccagagaaccactcgttgcgtagggcgaactcccatactctttcagaaaaggtccaaaagcatccttcattaggacacgagcataatcttgtaggtccataacaagataacgctgggcgaatgagtagaccttcgcgtgtagaactatagcatcccccgtatagcttcgagaagtcggtgaggagctggatgtagcatctaaaagcacttaataggttaatagtagagttattgcagatcaggtagactcactgtgttcagtagatgattttgttggttcttgtagtactgattttttcttgcttggatgcagttcccatggggtagtatatttctgggaatagcaaaattccagaacacaactgatagtttcttcatcgaaatcggaccagtccaataagtcttgtccggcaaacttccatggtccagtcaccctagcggttaaggcagatttgccttggatcagagcaccggggtggacatagaaagtggttttgcgttcccctacagcagcctttaacgggctttccatgtaaatgcttttcggccattagcacttgaacgaggaaaagaaagaaatgggtttcgtccagtacctatggaccagtgtctcttcgactgagctcatgatggatgggatgtagagttgcaacaaagacagaggacttgagatggccggtgtcagaatgaataggaaggaggggagggggagaatgtcatgagaaatgaagtttaaatgaaaatcaggcttgagtgggaagactccgcagcaaactcgtgatgagcccaataatacgaccgcaaggaatgatagaaatattacgattggtctcacaactatatcatctttcgatgccccccaacacgccttgtcttcagcccagctccagaaaccagttctgactttgtctgtcgctgctgcgcatttcctaaaagagcttggattaccggtctggtgatgtcaataccatcagattctcactaataatctatcacgtaagaattacatgaaaggatagcgctcatagaagttagcaaggtcaattcttagtatggtcaggagtgtaaaaggaagctatacgccgtgaaagacagcttgttggctctatttatatgcattgaaggctatatcgcctacactcaaacccgactaagcccgatccgtgcttgttaactttgtaaatcgcgtacaatttcatatgggtttagttggtgtaaatcttgtagtaagactcgctaaggctctctttgatttttatcttttctataactaagcaagtgaatctagcaaagtaatacaactcgtaaatgtttacagcctaagtaggtacatactgactacaagtaggtaccaatcaagagtgatgcaaatcaaacggaaggaatcaagcagatgtgatcgcgggccccgaagctcagaaagatcttgcgtgtggcaattgctaccaaggcgagagaaagaaaggtatccctaatattgagatatcaaggcactcgtccaccactaaagaagaaacgattctgctgtttactcggcagctggtagtaacatcttctccactcagcaaggtaaccgtctttcttctcacatgtcttttgcaggtcagccttggaggactgaaggagagtaagctgagccaaaagttcgcaagctagttcagtcataaagtcctcagtttgtttttgaaattggggaaggtaatgagcgaactcctcgtgtgatgaggcaataaagctgcgaagcgcaatgcgagcagcatcaatgttagtatctgacgagagcgtgcagctatagatgatccgaaccgcctccactagagagagacttgttgcttggggtgaagagctgtattcttctagacaaggcttgaagcagtccttcatctgagtcagggcaaaactttgtagctcatcgatgagataatgctgggcgaatgagtagaccttagcatgtagcactatagcatcccctgtgtagcttcgggtggcaagtggggaaccagactcagtatctaggtgaaaagaagcactaagtaagctgagctcctgggccttcaaactctaatcaacttaccttcctgagcgtctagttcagtcaacactagctctggctctggattccccgtgttcatagccgactgccgtgggacatcgtattgccggccatgaaagaatctcagaacgcaatcaatggtttcttcatcaaaataagaccagtccaatgtttcctctccggcgttcttccatggcccagtcaccctggcagtcaaggcagatttgccctgtatcaaagcaccgggctggaaatggaaaatggttttgtttttgccaacaacggccttgattgggtcttgcatgaatatacttttcacttatcagtaatagaatagcagtggaaatgagatatggcggtacctttcaaacttggttccttctaccgagcctatgatgaatgccactcggattttcttcagttagatatgcttgtggttgacagagaaagccaggggaacgaagagggtccttgtagataataaggaagaggaggcgctaatggaaccatgatagaaagatgaccgtgacaaccacatggcaaatatatatcaactatacgattgatgcacccatggaacctgacaaaatgatgatgtttggatgcatggctgctataatgcgcgtcctttgtcaggtcagtttcacgttagtttgaccttgctttgtgtatgatcctcgcccccaactagataagtgaccaaagacacctgaaagattcaaataaaaaggaactggataaagatgccaaagggtcagaggtcaggggtcaaagagaggtacgtagaacttgtgaatagaaaaagaaaacctcaatcccgctcctacaactaggcccgggctcctcaattcgatatccgtccagaaaagccgtacgaggaacgttcccgaactcctatgccggtaggccgtgggtccaaatataggcttgaggctagtggggttcccgacgtgccgagaaccctttccacggaatgaattgggagtgatgatgcgcttttagggtcgagctaggcacggagtggattccgcggaagacacacctacatttctagaatcggaagggttagaataatagcgctggtcgacgttgtttacaaggaagtgacggagtttgttgtgtatggcggtttccgagactgtgatttcttttttgtcgtagaataatgcagatagctgaatatgttcattgacatggagaggtccgtggctaagcgcatgaattgtttggcggcatttcatctccgttgtcaggacttaatttaaaccggacctcggactctgagagatgcaacgattgaaacatggggcgggtcgtaggtcgtacattattaccgaatgatgagatccgatactaggtgtcttttgcgcactcacggttagcttagtctcccttcgcttcgcgaacctttcaaccctgccaattcgaatagaaaaaaagcgccgtctattttccgtgccatattgccatattgagaacgagtatccatgcgtgtgcattgttcgggaaacagacctccgctgactctgaccgacttgctcggtccttttgaaacgacgttgaaagttgacgacttatatccgtaatcgtcacaaaggaccaataccatgaagcagatgcaacacagagacggtgtgagaatccaccccagaagcttactgtcatatttattgccggtaatcggcggaaaagagccagagacaggtcaaaccggaggaatctgtgatgactggctctgtcaacgcgacaataagtagcgggagccgcaggtccacacagggaaaagggggatcatttaggatctcaatggatgagattggtcggcggccaggggcaggttgcaaggacggggcccaccacagcgtcagcgaaatgatggtcggccgattggactgccgaacatagtcggatcatggcccgagggtagcggcaaaaaattaatgaggtggaatagccggtcagattggattctagacactgggactttgccagggccctcgataataaaaaccgagtccgatatacggctaatccgtgcgtattgagtccaatgttcgtagagttgatcccgggagattgtactgggaataacgtgcggcctgcgtttttgaacagggtatataccggacattagcagaatgtgtaggtataagtaattcgatccccgagatatgcccggagaggttgtctaagcggtgtcgggtctatctgtatggacgggatcccgataagttctcgtggggaatccaaaagcggcttagcgttggtggggattccggatttagctcgtactcgtactaatatatatctgcctcgttgatgtggttgtagggcttcgagggggatgaatggaatattgacagtctgttctatgttgggacaatattggacacggctctggaatattttatacctcccttcacatagatataggtagtagatggcacgtttggcgaattcaggatcgtccatcgaccccccgcattttgacaagctccatagcatgtccacattcgtgcatggttaatcgaaatcatgtagatatcattggtccaacacgcaaatccttgtgtggagaggcctggttctggcgactttcgctccatacggtccaacaaatgccagactttatttccgtctattgtctctcatcccatacatcctgagcggggaatccgcggatagccatcggttgagcgtcggttgaggggtcggttgaagggcaataacctccggttcggaacgagtttgcggctgtgtagattgacttggacatttgagcatattagaacaagcgcaggcccccattgtcccggtttgaccttgtatagttgtaccagagtactcgactctacacgacataaccaccccgcaccttctctgtcttgtgacttttcttgtgtctcccctcatattctcccttggcctctgttctctgttctttgctttcaaatattgaccctgtcgacacctcctgtcctgaatctcatataaaagcaacactacgtcatcggtaagtaccatggtccaagatcgtggacagtccccgtggcttccaaatccaccaaagaggatcctgctagtctcctgcaaagggcatctcccgtgcttcttgacattctcctatacatcgtgcattgtattgacctgcatctacagtaggacctgaatacttcactatggcatccactctcaaggatagggccgccaaccatgctgctgcttctgcggaaaatggcactgagcccgaagctcctcccgacctcctgcaccagccgtacgtccgcgccgtcctgcccttcatcaacggcggactgtccggtatgaccgccaccgccgtgattcagcccgtcgatatggtcaaagtgcgcctgcagctcgctggcgaaggagcccgcactggtcctcgcccatccgccctcggcatcactcgcgaaatcattgcctccgggagagtcctcgatctctatactggtttgtccgccggtatcctccgccaagccgtctacactactgcacgcctgggattcttcgaaacatttatcaagaagctcaatgcccgcgccaaagccgcagaccggaacgtaaccttcgtcgagcgtgctgcggcaggactgacggccggtggagttgcagccatgattggaaacccggccgacctgtccctcgtgcgcatgcagtccgacggtctcaaggcccccgaggctcgtgctaactaccgttccgtctttgatgccctcgctcgtatcacccgcaccgaaggaatcggtgctttgtgggctggtgcttctcctacggttgtccgtgctatggccctcaacatgggacaattgactttcttcgccgaggctaagcagcagcttaagcagcatacttccctctctgctcagaatcaaacttttgctgcttccggaattgctggcttctttgctagtttcttgtctctgcctttcgatttcatcaagacccgtctccagaagcaacagaaggaccccaagactggcttggttccttacaagggcatggtggattgtgcgcgcaaggttgccaaggaagagggttggttgcgtttctaccgtggcttcggaacatactatatccggattgctcctcatgcgtcagtcccccactattttaccccaactttcccccccactgactcgatctacagaatggttaccctcatcgtggctgattatctcaacctcctcaccaagtaaacttgctttgaaagcctggattatcggtcttcgttcttttacattgctctccgattacacgatatcgcatcgacacgctcagttatgcgatttaatactctcagcacgccacagggtctattgatagacccaatctgctatttttaatatccatgggaagcgcagcgtccgggggaagacagccaattcaactccgagacactttatactccgtttggccgatgtgcatcgcacaaacctataatggcaaatcacccatggtagatgtggttcgacattcggaaaacatggtaccggcgaagggctattgccacatacaatttatttttctttgggaagagaaaatgtcggaggatacgcggccggccggtcttctccgcggaaagccacgacaacagaatgcaaaacatagtcttttgtcacccccttgctcgttttcttgttggtcggcttttgttgtgtttcgacaagcgaataccctcttgtcttgctctgttctttgcctctatacctctaccatactttatgttggtcttggtctgctttagatatgtagttaggtagtatcctcagcggatatagtgtttacttgcctatttctctcgttccattttctccgatagtaaaacattccaagatctctttgtcctagatatggagtagtatgtgagcctttgcactgactttgagcattcgaactttcgagtttccggtgatgactatcatattttctaaattattgtagttaagaacaggtaagttgtcccattgtgtatgtgaatgtattccatcctaacgccgaagcagaaggcaggtcctacagaataaaagcaaacaagagatagacatcccatcgtgaaagtgaaactattcaccattaaaaccgacatcgtaaaaacagaggcccaaaatgcaccactggcagtaggcaagccagatggccgtggggaatcacaagggtacaacgtgaaaaggaataaaacagaagatttgttcaaggtccaaacctgagactcgggaccagatccaacacagcccgtcgttaaaaaaaataaaaagagaaaagatcgcatccagtccacttctcttccgagtccatattagttccgattagatcttctcctcgccaacacgctttgactcaacagcgccaagcggcagcacgtcctcaagtgtctcgtcagttccctgaatatcatcctccacgggaaccgagtccttgatcttgaaaaagacaacagggacagcaatgaggatcgacccgcacagaagaccgaagttcgaggcatattcgttcatatacggcagcttcttctcgtccaacgaccacataacggccgcaccggcggattgcagacccttgtagaagcctgccaagttggcgagcttgcgaccggagttaccgagggcgcccatgatcctagaagaaacaatgttagtcagcatgtcaggggaaaagagggagggattcttaccagtagacaacaccctgccaggcagcatcgtacatgccgtagaagaagtaaaggaacataggaccaacgtagcccttggtagtccaatcccagccctggaaacctgtgattttcgcgtccacatcctcacgggtgtacctcctctgccaggcgtacccactaccccaaataacgaccgtgaggatgaaaaggccgaccaaggctgccctagcacgaatagtacgacggacgcgctccgaatcaagcagagggcccatgatacaagcggccacgatctgcgcaaaccagtacaggaagccgttcagggccttggtgcgcgtgttgaagtaggcgccgttgatagagttctgctggtatgtgtagaaccagttggaggaccagaacatggggaacaggaggacgatccacggctccgagcggactgtctcccacaggccgacgatctcggacttccaagaggggtgcttcatcaggatgacgcgcgagccgtcggtacgcacaaccttgtctgcgtcacagatgaacagagcaagacaggcgcctgcaaacatgagtacgataaaggcgatgtaggtaccgtcgccgacagtcttgtttgacgtgacgtggatgttttggcccaggggaatctttagattgacattgttagttgttgttgatggatggtctagccaattgcaagtatagggctaggtatcaggggctgggctggtcttaccaagctaccgatacaggcgccgatgttgaagatagcccagaaccaggcgaagtaacggcccttctgctgctcagtcgggtaggacatcatgatggtgccctgggcgccccagagtagacctgcgcagacaccgaggaaggcgccggcgaagatgttgaaaccggggacatatcgatgctcggagaccaggagactaatggagtaaatgcagtaaccgattccaccgaaggagagagaaagacggacgccgacacggttgacgacggttccggcgaagaaacccacgacggcgaaggtactgttcagggcgatgttctgttgttgacaacttgttagattgtgcatatagaacgcgacccaatcggagtttcggagtatcaaatgggaagagtggagacgagatagagaacaagtgccgaggtccaatcataccattttgtcagccaagcttgggtcggacttgccaccaccgcccatcccgctcaaggcgttaaacatgcctgggcagaggaagcagacaaaggcgaccatacccaactggatgcgtggcgaggcataccagccggtagagaacttgccgatcttcccagacttgtacatccatcctgcgggtcggggtatgtattcaggttcggaggaagattcgacgggagtcttccgttcatccattatgaatgaagacggagtgatgccgcagaagaatagacgataaaaggtggatgtagagaatattaaaaggtgtgtgtggtgatgaggagagaagatcaacaggaagacatgggattctttaaaacaaaaaaaatcataagatagccagcttgtacaatgtacccctgccactcgaagacaggtataggtactgagtccagattacaatgcagagatagatgtatcaacagccaaaatagtgtatgttgcagggtagcattgggtttggtcacgggctggagctagctttatgtggctggccttagggaaaaggataggcttagatattggtggtagatacaattggacaggggttcttatttgcggggagcttaggtaggtgattgggggccaggacgctttgatagtagtgttacaccgggatggcactgtgtctttgctctggcaggccttaagaataactggggaaagagatgtagtatttgtaggtcagcgacgttacgacgggggctaatatagagttagcgaggattagagtcacatcccgtgggaaaaacggaaaatcccaacttggcagactatcgcgagacttatcgtataagcgattaaggagaaggaagggacgggtgctgattggttggctggggacccacaggcgagtccgctggttcaactgcggggagaggccaaaagaggactagcgcaatcattcttgtttcggaattttggcacatttttgacatctgacagtcaccacgtttcttgatctatagttagtcgcggtataaatcggatggagagttgatttgcagagatacagtcagcttccagaattagtatcagaaattaaattccggaactttggtctgaaacgtttcattttcggcttgaccgaagggaacttcatttaaaaatgtgaaaacgtaaaagcatatcagtcgctgtcttggctttcatcctcggaccccttctcgatcttgggttgaatatcactatcactgtcttcactgtcgctgtcgctgttgctgtcctcgctatcctcgctatcactatcctcactaccctctttatcctgcgctttctcattcggcacatccgcttgtacgtctttctgagcgtccgcatccccattctcttggttctgctctttctcgttgtccgcagctatctcaacctcttcattccccgtctcctcaatttcaacttcctcgtctgcttcttcattctctcctgcattctccacattctccgtatcctcaatctccgcatcactctccgcatcgctgcttgacccgtcgtcggattcaacggcccgagcaacctgactgagcggctcctgtttgacgcgctgtgaggcttgctgagcatccacatccatagcatcgtcatcgctttccgcgtcactacccaacgtaatgccggtacttcgatccttccgctttctcccatcaccttcaaggtgatcgtcttcatcttcgcgctgctggagctcttgggcacggcgaacccgtcgtagtagaacaggatctggccgcaaatcatccgcagtcaacggagtagaacaaacaggacatttgaccacacggatgcggtgctggccccgacgagatgccgggggcgcaatagtcgtctggctgcggctgatcatgtccataatggcctcccgctcgaagctgtgcggacatttggtgctcttcacaggatcctggtaaagtgtgagagtcaatgggcatttgagggagatgcgctcgcgctcaatggcaatgtcatcgtcggagccggcgggcgagacgccacggttctggtttcgcgtacgtgtcgatacccccgatcgcacattcctatcttccatgtgctcaaaccatgtagaggagtgtggcaacggtgggacgtcgtcgccggggaacttggagtcgtggaccatccggtagaagccaatgtagttgttattgctggcatatctagatcgtagttgtcagtatctgagccgtcggataaaacagccaatggctaggaataatctcatacctctctgtcaaagatagctcctcccacttctggactccctccgtcaacttatcgaccagcttgcgactaggcgggttctgtgcattgcgctctcgcatctccctctccagcgcatcttcagaattaccatcgttgggatcctcagtcccatcttcatcatcgtcatcattggctctctgccttgtccgctgttgacgggtctgtctcacccccaaagcagcagcgacattctcaccctcctccctttcaatttgacccagcacatcggttaacccctggagcttgatttccgaatcgacaatcagtcgtgtcttctcctccatccgcgcagtaatagcactgactcgagcctctgcgtcagcaagccgctggtactcctcattggactcgtcgtcgtcgacattctcttcaccttcacgccgacgcgcttctttatttttctcgtatcgtccccgagaatcgctaaggcgctcatttacttcaccacctgagtgtgtgagtttctcgacggcatgttggagatgggtgcgaaggttgcggaggtgatgtgatgcgaggagagctgcgattttgcgctggctttctgctgtaaggggtgcctcggggacctcatattctggcaggggtattgcatctgagactgaggtatggcttgcgtttcgtctgtgcgattgtgctgatggtggatgggactgagattgcgcttggcttggtgtggccgacattgttgcggggggagaattcttgtagtaggtgagttggcgagatgcagattactaggagtattatgctttgattcgggtacagggcttccaagccgttgacaaagaaagtccaagtaacaaagcgcatctcgaaatccggacgcgagacgcgattacgctagtcctgtttggggttgcgtataccaacgataagccttatcactatagaacattggaagtactctgtcttccccgacatactacattgtgacgactgcttagaaaaacgaagtcaaaatgagatggcttaatcatacacagcttcccagcaacaaaggcttcttgttttataaatctgcatttgctctgaaactagttgcaaccgttagtcccactctaactgccatgtcgaagatgcggatggcttggcgtccgtacacacatttgattcaacacagatctgcatttactgaatagtataacgaagcaaccttatgcagcgctatcctctagcggtgcaagtgccgccgctaagagacccagtggctgcttacccgcagcctataactcgatcatactccacagtcaaccccaagagcccacaattgacacatgaaatcctgtcataccctttttgggagtgagtggatatgcccgtaggcaaggttctcttgggaactgtaatcatcaatcgtgccatgcaagtgattgagaactattgttatttgacaagtaagaagaagaagattatttggaattgaaatacaaatggtgagcgaggaagagttcacaatgaaacattaaaagaatccatgagcctataccttgtagaagcagtatgcatggtagaagcctagcgatgtcatctgttagcaactgcgaaaagcaatacacatatggatattactcactgacagcctccttctcttcctctgtcatattcaaagcaccagtcgcgcggtctcttacgcccatgcgatcacccagcgggcccagctcaggatgattcttctcatcctcccaaatatccaaaaatggcttgcggtattgtagttctaggttgtaatcttcggtcaggctgggttgaaaagttagttatgcatggcaacgtgatgaaagtcggaactcacgctcggaaagcctcccagggaacaacgtattcgggaacctcttctactgcctccttcatgaagtaactgtacttccacccgaacggcggacggaagattccgtcttcgggggttgcgccagggaattgaacgcgatagatatcgttgccccactgggcccgctcatcctcttcgacttcaccatcctcggggccttctggttcaacaggtttagcagcctcgcgctccttgcgcgccttatggaaggcagacacgcggctggtaatgacgtctgagttgggacaaaccccaaggaaacgaccacctttcttcaagcaacccgcgacattgctgagcatttggcgtgtcttctcctcagactcaaaggcgtagtgaatggcaaacatacatgcgacgatgtcaaagcctccaccgccatagcgagaggccatgatcgatccaccgggcccggcattagcatcgataccaacccgctggatgatgtcgatatcgcccagccactcaccaaagcaatctttcggatagaactcggcatggaaaattggctgcggtggtcgtcggcctcgctggccgcggcccgagcgcatttgatcgtaccggccccgcgcttgctcaattgaaacattggcaggatcaagaccgacatagaggtcaactggctgaggcgccagctgccacttgcctaaatcgccacccttaccacagcccagatccagtacgagaagcttttgattatcaacaggcggcggcccttggctgtcattcgcccagtccttgctgtcctcaaatcgcgcgacaaatgtctcatccggggagaacttctggataagagtactcttcacccagttgttgaagctgcgtagccccttgatcttgctctctgtcttccgccactcacggcctctctccggaaccgcgttgtagtgttgtcgaaccacgtccgagataccgcgctgctgagagttgcgcatagcctcatccacttctgcgcgctcacgttcctcctgtttgcgtcgtagtgtttcacggtctaagaggccctgtcgtgctccgccgcccggtctcttccgttgacgcggtgcatcgggggagggagagcgacgtggctgtagtggcgatcgagagcgtcggtcttcgcgtggtggagcgccgcctgggctgcgagagcggttgcgtcgcgagaatactgacggcggagttcggccccgtttccggagggcttgatgtctctcctggagtcttttgcgcttggatgctgcgcttgatacatgattcgatccgtctgccgcagtgtctccttcgatgctcctgtgtctgccggtatctgttgaagggtatgtggtattcgtgcgggcaggcgagcgaggcgtggaccgcccacgagctgcatcacgagctctatctccattgggatgatccatgctgacgtgagtagagttgtgaactgtttcagaagtgattcgggagaacaatggtcgcgggatctgtggaggaaaagaaggaaaggtgtatgccgcacttaggataagcctaaaagaaatatataattttaggttgatttcacagaaatgtcgcctgcggagttgtgaaagtcagagttatatcagagtaatggccagctggaggtccagagaaagtccaaagagctccggatctcggccaatcagagagttctaaaccaaccctaattcccattcatctatctacaatctttcaatggattcttagattatgatgtctagaaatgaatgagatagatgtattctcatatttgcgaagtgtcgtgtctcacaatgatcataaatcgaagctatctgagaaaaaaaaaaaaaaaaaaacacaagccgctgaaagacacactttgaccctcttcataaaacccgcgctcccaattaatgtaatattaaatagaaataaagatacgaatgcaagatcattgaggcaagacagctttccgttttggtgacttagccgtcaaaacctgtcttactcgtcgaattttcgcccaccattcgcggtccgctttctttttcgcatccgcattttcttcttggcctgcagtctcggttggtgtgcataggtcggtccgcaatgtatcagtggaggccatggtacgaactctgcggcggtgtttgacctttacggcctccgcgacgatctgccacccagcacgtagttcttccaacctctcgttgggtcgcccagtgccactttgggctaccttgtcgatccagggacaatactccatatgctcatcggccacattgagggaagtgtagacggtgacgtctccattatctttgggtttgtacatccataatcccaggcgacggaaacacgctccacatccgactaatcccgcagctccatcggaggcagtatcccagccgagcaatgctaacgccagggcagctcgattgacagctttggatgtttctgttgagtcttggttgtcaatgtctgtaggccgaatctctccgttcatggataccgcagctttctcggtctctttaaaccattcgtccggaagtcctttgataagcacatcaaggtcaaggccttctggagtctgaatgatatcatcagctggtaatttatcgcccatttccaagatgtttgtatatcgcatgtgaaggcccgacagggcagtatcacaattggtcaaagggagatgttggatagtggctaatctgatgttagtcataggacaaaatgttctcagtcttatttgaactcacaatcacagctcttgtttcgccagggacagttttcgccgtgagcattacttagcatttttgcatactcatccaccagcctcgcacctgtaggcatataggttagtataaaacctcaatcagctagatcagagatctgttgtattactcacggacttccttccgctcctccaccttttcaatgttgaaaccgtcgagctcatcgatttcatcggggagcttcacaacgactgcgccgccgcaatcactcacgcaggtgacgcgcatgacgtctgtacagatccaaccacgcttcgcccattgcacttcattgatcggagacggctttgacgtccatcggtcgacacggcggaaggtctctaaccgctcgagaaaacgttcgcggtcccaagggacaaaggttgggcgcttattcgaagttgcggaggctattcggtgccctggtcgcgatatcttgtggattgagttgcgcaccgctgtgagctccgaacggtcggcgctggccaagcgtactttcttgatcgataagttggcggagagacggtcttgcgccgtcgcaggcgccgtaggggctggtttaggcgcgttgtcggacgtaagaggtttggatattgattcgagaacacggtggaacttccgcttctttgattctagagcgtaggacatattggtgctgggctgagaaggaagtcaagtggtgcagatcaacacaacgcggagagggttggagctgcggcgatcataacgcccgaatgtgtatcagcctgaggcaccaacatcgatattaggcccgtacatcgatactcagcggtcaattctaaatcgaacggtatggatgtcagtattctctcaattagaaatttaattctactgtcaactgttgtacactgttgacagtgctattccactccgacaaatgctccactgctgattggctaaggcattccgtgacatcgtacaatcctccgaacttcaccaactttcttccttcactcatctgccttgaccatggcttctctgaggagctctctgtcgctatggcggagtggtgcgcctcgtttggccaaagactttttcacatcccaatgcctcccaagtcagggctacgcagccaaatcaatccgccaattcggtgccctccagttccgtcaacccagcaagattcaatcgacccttctgaacaataagaaattcttcacctccagtatcaagcgttcaaatgccgcaccggccattgcagaggcggtggaagaaggcacaacgaaaggcaaatcgagcttccccaaaattagcgacaagaccgttgcctactggctactaggcagcgcggccagtgtttttggaattgtggtcttcggtggtttgacacggttgacagaatctgggtaggtggaccgaggtgcttgttttccacgaaaagtgagcttcgaatgctgacggaacatattctggcacagattgagtatcaccgaatggcgacctgttactggctccctccctccaatgaatgcggaacattgggaggacgaattctcaaaataccgcgcctctcccgagtttcaattgcttaacccgaacatgactctatccgagttcaagtcgatctactatatggaatggattcaccggctctggggccggtttgttggaatctcatttgtgctacccgcagtctattttgtcgctcgaaagaaggtctccacgcccatggcgtggcgcatctttggaattgctggtcttattggtttccagggattccttggctggtggatggtaaaatctggcttgaaggatgatctctttgctccgggcagtcacccgcgagtgagccaatatcgtctgactgctcacttgggtgctgctttcgtttgctacaccgcgatgttgtggaatggtctcgctattctgcggtctaatcggttgatggctgacccggctgctggagtcaaccaacttaatgcgctgcgcgacccgaagctggccttcttccgccgctcagtcgctggtattgctctcttggtcttcataactgttatttcaggcggtctcgtcgccggtcttgatgctgggcttatctataacgaattcccatggatgggccaaggactagcacctccaaaggaggagctgttcgatgcccgctactcccgccacgaggaccgctccgatctttggtggcgcaacatgcttgagaatccttctcttgttcagcttgaccaccgcgtcctcgcagtgaccaccttcaccgtcatttgtgccttgatggcttacacccgcggctcccccaccatgaagcgcttcctaccggcacctgctagaaagggtgtccacggcgtgtttgcgtttgcgtgttgtcaagttggactcggtattagtactcttctctacctcgtgcccactccgcttgcctccgcccaccaggctggaagcttgttcctcctgacctgggtcataatcttgggcagccgagtctggcatccttcacgtacagccaagctcttgcagatggctgcgaaagctcgctcccagcagctctctaaaactgctgcctctgctgtaaagagagtctaataatcctgcctctcgagtgtatgaatatgtcgaccagggttgattgtgttcatcgattgccttggtaattgataccatctccattcctctgttgactcgagcgattctcgagtcttattgtataactagaactactgctttcattgtaaaaaacatgttttgaactaaatcaaagtttattggttgatctacctaagtccgaaattgatatcccctttttggtttttttgttcccttttttctcttcttcttcttctttcttgcactttttacttcttcgtcctcatctttcatgtcttcacaattgcgtttcacattttcttactctcgggtttcaggtctcagtgatacttcattcctcttgccaggcacttactccgccaacttcgtagcaggtctcgcagcgcgcgcagggttgcggcgtgctatgatgtatccaacaggcagaccgtcctcaccaataggaatatcagactcatcgtggggccactcatctcccacaaccgacatggtcatatcagaatcagtggataaagtatcgacctgcggctccaagacctggccacgtgcaggagccattttctgtccacctgtattactttgcacatcgctggtggcactaggagttccgttaccaaaagatccgagatccagcagggttttcgcagccctcacatcggcagactcggaggataggcggtcttgagtcccatctagggatggcaaagatagcggcatatcgccacccccctcggggacatgaatagctccaaaggaagcgtgtgtatgatctccgtttcggtcggccagacacttgcggcaaacttgccagccgcagttctggcagcgtgacatgccgttcttgttgcgcttgttgcatacgtcgcactttgcggtgtgggctgctacttctgagaagttaacgccgactcgccgtctctgggatcggtggtttgcggctgcatcgcggctcgccatttggcggccgttcggtggcacccggtttgttgagaccgctcgaatcgggttggaagagatcttcttcggggttgatgacacctgtgtgcttggaaatcgtggatcgcggagtgtcgtctgcgcggagttaagagtcgactgtgtgggcgctgttgatgcctgaactggctgggcttccttcagccgtagagggattggaggggcgatatggttctctataagatgggcttgtaagggctgagatgctggtttttgcttcttgtctttcttacctttgcccacgttcacattgggttggaaccccacggtagagacctattagaaagttagctatatttgataccctctatttttataaccatcattctgcacgtacgtcttggtaggtaaatccgggctctcgaaacgcctaacacaattttagaatgatatctcagggaaaagacggatggaacaaacattccggctggggtcaggcgggacaagccatccattagctggatagggtgggtacgggttgggaatggtattgatcttttgtggtgaagacgaggaactattgcctgttccatcgtacatgttgtcagaaagatgcaagctcggctggttgcgcttgttggcttcgacagactcgtcgagctctcgaaaagatgggagactcaagtctgggatgcgagggagacgcatggtacgatggggcatgattgcaacagaggtgtgctcgatggtacttgatgatatttgaaggaagagttcctttgagcaagaatgaaaaaggaagaggatggggatgtacgaaatgaaaatggaaaatggatgtggtgtagataaaaggcttggggttgatgaaggttctcagatgcaagttgtactgggcattgttatatacagtctcatgggatcggatgacgcctggtggtttgtggagagcgctttaggacaggcaaacagatcgaaaccttcgaaaatacaacacacaacacagttctactcgattaaattcagcagctgatcaacctctcgtcaatctcattatctatcttgaatcaagtacaaaaggaagaggtttgtttcgaaattggctgtatcgccgagatattcttgagaacccattttatctgctgcgtttatcataaaacagagaattgcatgcagcccccaagacgcatcgcacatcaatagcatcaacatcttctcgggcaatcacgtcattttaatcatttgtgggctgtatattcatcgtcagtgatatcggctcgtggaaatttgctgatattaataacatacggattccttcttcggggctaggctcgataccgacgacttcggcagcagtcttggggtcggcagcagtcttatcgtctttcatcatggggaaggtcaacacttccttgatgctgtagttgtcggtaaggaacatgacgatgcggtcaatacccagaccccaaccagcagtcgggggcagaccgtactcgagggattggcagaaagtctcatcaatcatctgagcttcgtcgtcaccttgatccttctgattggcctgctcctcgaagcgcatacgctggtcgaagggatcgttcaactccgtgtaagcgttgatgatttccttggtgctgtaatttggttagctaaaattccgcgaagactgataggccaattataggcagagcgaatttggaaagaacggggggtttcaagcaactagaagttgggtgagaacttaccaaacgaaggcctcgaaacgctcgcaaagaccggccatttgacggtgcttcttagctagtggcgacatcatctgggggtgaccggtgataaaagtggggttaatgcaagtgttctcgatgaactcgccaactagcttgtcgagcatgcgggcattggtctgaggagccgagcaatccacgttcatcttcttgaggacgcgcttaaggaattcgttggtctcctgagtgtgaagctggtcactaggggggaacttctcgccgcaagcctcctcgagagcaggcatcatctccacccgcctccagggagccttccagttcacattgtaagtttcgccagactgagtgtggaatacggtctcgtaaccaccagtaacgtgcttaaccagattcgagacgagatcctcagtcaagtccatcaggtcgtacacatccgcgtaagcttggtagaattcgcaggttgtgaactcgggactatgggtcagatcaatgccttcgttgcggaactgtttgccaatctcgtagactctattcgtgggacaattcgaacacacgctcgagccctccaacaaccagcatcttgaggtagagctcgggggcgacacgcatgaagaggtccatgtcgaggtcattatggtgggtaacgaagggcttggctgtagcaccaccagcaatggcattcatcataggagtctcaacctcaatgaaatcaaggttttcaaagtactggcggatgtaggaaacaatcttagatcgtttacgaaggatatcacgtgaccggtcgttcatgatgagatctaggtagcgctggcggaaacgctgctctttatcctggaagccgtagtgctccgaaggaatcgcatgcaagcaaggggccagaagaataacctcagtggcgaagatagaaagttcaccatcgtcacggttcttggggttggtccgaccagggaaacccacaatgcccacaatatcacctctgcgaagtagctcgtgctgctcttcgaagggctttccggtcgagaattgtgcctggcacattacctggatcttaacaccctctgagcggatgtcataaaagttcagcttgttgccggaggtacgcttggtatagatacggccagcaacgcggacggtaacatcgggcttctgttcgcccttctggagaccctcataatccttaacgaatttgcggagatcggtatcgacgtggaatttgtgtgggtagggatccggctgcttagtttcgcgcagcttgttgatcctcttgctacgaatctcgaagtattgctagaacgacacattaattagcgtcgcaggacctaggaatcgacccaggagtaagatcactaacgttaggagtcaagttggcctcgtcatcctcggcagacgatttcttctcggccttgggcttagggggagcagctgcctccttctccttcttcttggcgtccttctcacgctgcttctggcgtctcttcaattcagttttggagactttctcgccggtgacatcatcgagaagaaggttggcaatggaggcagtggcctcttgaacaggattggaatccgccataatgtgtggttacagagaacaagaaagtgggatggtgggatggtgggataagacctgaatttttgggcggggatcggcacggcatgtgattggacgatttcctataactctggggttctttcgaccttcgtgactcacttagattgactcattcctggattggcgccgagatatctatgtaaataagatctttatttgaaaataaaaattatgttttatctgcgggaatcctacttcactttctccgttgtcaagcacctcacggatactaaattgggatgtagggcttagggcactggaggtatctaaaatagaccttctccaagcattgcaattcctcctcaaaaagagctatggaagcctggaagcctggaagctatgctaacacaatagcgatagcctgactacaactttgagcagttgctacagccttgttcctaggcagtgccactacacgtgcctgctttaaagtggctcgctcctcgcaatgactgtttttttgactggatagagtgctatagatcgtccgctatctgaactttgatattttggtttatcaggcattagttctgcaatctgggctagcttagcttactcaatagccaaatgtacagttcaacattgaagtacaacgccatagtatagtaagaagggacatagcgcatagcgcacagcaagatggtagggtagatactttaaaccagtaacaaaattaagtcacttttatcacatcaacttcatcatcgtcaacaactactgcaacaactgatccaacaactgcttcaaaactgctctatcattatagagggaataaaatatctagttttaatttaaattgtttcatgttcatgcatgacagagagagctatggttcaaagactctaacagtcaatttaagaccgcgattataatccacgttcgtggtcgagacccgacctgatggcagcatggaccttcggttcccaacataaaaaattgaaattgaacggaacccaggcccaaactctcccagagttaagggacagtcaacgttaccattccacgacatctttcttcgcgataaaaagggcagggaggctggttttgttctcactgaaagcgatatggaagagattgcggagaaggtatgggcagtctaggacgtcgaggagtaagagaaggatggtgaatgggccggttagctgaagcgttagggtggccactacgcagtgtcgactatcttccatctcttcttttgcccgtcgtataagcgagaacctcttgcatcccatattttttctatcattggtcattttctggttatcccaatcaatttgcttgcttttatttatactatccttgtctccctttcatttaaatacgcctaccgttctcttcatcatcttcttctattcacccatctcctcgacctcggccttgattctgatttctcatcctatctgctgatggcagttgatttctgtctgcagacttcgctttttggctatctgtttctccctgatacgcctcatcatctgcagtagctttcacttttcggccaacttggtcttgagaatcacgcttaactctaatctgtgtccatctgtgctttttgtatgtctcaccttgccgtactactagtgacactaggcatcacttcctgactcttattaatgatcttatggctaaccataactcctccagatttaatcacaatgtcaggcttgtatgatcgagttccgaagtcggaacccagcctagccatgtgtgagtctggttactcttagtagagaaggtcttctcgctgactagcctcttcatacctctagccggcttagctgttccgattccagtgtctcatggactatctgatgttccttctgcccatccaatccccgcctcctctctcgataatcttaccatggacatgaaaaatctggtcagaaaaattcaagacctcagtcacttggggattgaggacagcaagattatgcttccgaaaatatgtgtcgtcggtgaccaaagcaccgggaaaagctccctcatcgagggtatttccgagatcaaggtgcctagagccgaaggcacctgcacgcggtgcccgttagagatcaatctttccgaaagcgacgacaactggaaatgcgtgattcacctatcacgccgctacatctttgatccatcgaagcggatgaagatgcccaagaagtcagagccactaggaccatggattgcgcttggcggccaagacgatgaacatttcatcaccttggataacaagcaggaagttaagaaggctatctggtgcgcccagttagctatcttgaaccctagtacagattcgcaggattttcttcccggatctaccgacatggcacagacacctcaggttaagttctctccgaatgccgtgcgcctggatatatctggtcctggtcttccaaatctatcgttctacgatcttcctggagtgattagccagacagaacaagataatgaacgatacctggtcaatctggtggaaaaccttgtcaaagattatgtttctcaggagcattgcattgtactcctcaccctgcccatgacagacgatgcgacaaattccagcgctgctcgtctcgtcagggacatcaagggcgcgaaagagcgcacccttggggtgttgacgaagccggatcgccggccctccgacgaagcatttgaccaatggcatgagattctggatggaagcaagttcaagcttggccacggttattatgtcattcgaaacaatcctgatccacttgtcagtcacgcccaagctaggaaggaggaagagatgttctttgattcttcactgtggacacgggacctcgccgcattcgaagatcgctttggcacgagacaactccaaacggcattgtctgacctcttgatgcgtcagatcttaggatctttgccctccatcattgcccagattgatgagaagtccaaggcaattgatgaagaactgcaaacccttccaaatcctcccactgaggatgtccaaagaatcctttgggggaaaacttcagaccttgaaagaaaaattcatgaactgttcgatgggacccccagcatcgagcacggttcttcccagcgaaagccgctgcaagagcagtggaacaagattgttatggaccttcaaaccgcacttgcgaagacacgccccatcttggatgttgctgcgcagaaggaccatgaggacttggctgaagttgttgactcggattgtgagttacaaattttgagcgttagcacaacaacgccaaagaaacgaaagtcgcctgcgagttgtacccctgcatcggaaccagcaactccgagaaggactgtgtacagcacatcccacttcgaggggtcgaagtctgccagaatcagtctacagcagctcaccgaactcaagattcgctctaacacagttggtgtaccgaaccagcttgatccccgagcgatcgagaatttgaacaagaggagcgttgagcattggggaagactcatggagattttcctcaaggctacgcataatcttgtccacagtatgcttcttgaagctctggaggaagaatttgcacaatatcatcaaactgggctgtatcaggaacttagcagatttctgaaagagttcatgggcaagctgcgccaggcccatcttcaaattgctaaggattattgcaagtccgagcgtgagataccgttcacaatggcccaaggtcagcatcaactcttgatgcaacagacttcgaacgtcctgaaagctcgtcgattcaatactcgcgcaacttgctggctgaaaattcgtggccatgataacgatgacaagatttcggagaaggtgaagaggatccaattagagcaacttggtcctgatagatactcccaagaacttgaaatgatggccgtaagtcttctagggagatttgctgacattcactaattgcggtcatagagctcgcttgcatactacgatatcgcatcttctcgtttcctggacgtgttgtgccagtctactcacatgaagttgttccgggcttgccgtgcaagtctcgttagtactcttcgtgatgaccttgaaatatttggcgacaacggtgagcatgcacattatatgtgtcaagtatgagattaaaaaatgtttctaatacgtaacttaggtcgcgcccgctgccttgacctcatgacggaggaccctgagcgccagcatcgccgtgctcagttactgaaagagcgggagaagttttcgaaagctcaggaatggttggactctgtccgagattcggatgtcgagatggaagacgaccaaactgctgttccagacatcaaagaggactggtgattcctcaaattgtcgtttcctgtggtctccatgattttgccatttacactggtattgaatgggccaaatattggcttgaggggaagtgttttcggggagttcctgtgagcttcaatactgtttcaaatgtgatggatgggatggagatatgaatcaaatggaggaatggaaagatgtcaacaaggactcctgaaaatcgtgtttgttaggccgcgatgatcgcgaatatacttgttcatacctttcccgaatttgataccaaacatttcggggatcttggaaggattgtaagattttgagcaaggtgtaagcattcgtctctacgctcgagtttggtaggctttggagctaattccattggccgtcgaatccctagttcttggtggcctataacaagcttttgagaagatgcgagtagtatacaaaggtgcactgatatcatgccttcagtcttcttgtgtctggagaaatgaaggcggtaagagtgtatcgtaccgcctttttgaaaggggaaagggcacccaacgatcccaactgctcatttgcctcgagccaatcagcccttttttcataccagtcaaaacgcaatcaggtgtcttcgcctacatcgggtgctctattacatctaccaagacccgcgatgacacgtcgggcagcaaccctgccactgctcagaggcaacaccacattggagtcagcgctggagcaagaggaggatgtttttcttgacttagattacccagaacagcgcattgatttcttcgtgttactgtacagcaatcgtgatgatattgagcgtattgcctcatatcatctcggtctaggtccttcggatacttgcaggactggcgatgtaaaggaatgggcccatggcagcttcaatgtttgcattctgctctatgtcagtaaacaaggtcaatatctaggaaagcatgctctcattaggtttcctttgccctacaaaataggagaactcaacacccccgacaatgtggacgagaaactgcgctgtgaagctgcaacttttatttggatacatacgcactgtccggaaatatccattcctcgactgtgggggtttggacttgttggaggtcaaagtgtacgggacctcaatggatattggccaatagtattacatgacttctaacatatctttacatagtttacaaaaccggagaatatctctctcggaactagacttctctggactctgaaaagatctatcatacggcttatagggttctctctaccctgtccctatatatctcatcaacgtcagacattactcgaaactgggtacttggtgattgactacattggcaactcggaagttcaaatactttcagagacatgggataaagactgtcatgagcaagtcataagaacaaatctttttcgcgggctttcacggatgatgctttctttaagtcagataccactcccccgcataggttcatggaccctcgactgcaatggagttttgcaactttctaaccgacctcttactcttcgactctattaattagaaaacgggggaattccgaccaacatcagtcgaagcctgacctactcagcagcggatgcatactacctcgatcttttgtcttgtcataataatcgcatacagtatcagccaaactctataagcgatgcggatgatggccgggtacagatagcaagattgacgataatgaaagcgctcctacctcatttttctaacaaagcgcttcgagaagggcccttcctttacagactcactgatctccatcctagcaacatatttgtcgatagcgattggaatgtcaagtttgtgattgatctcgaataggcatgctcactgccagcggagacgttgcgtcctccgtactggttgaccggttgttcagtcgatgaactaacaggcgggcatcttgaaacctttagtgaggcctacgaagagtttgtgggtatttttgaggaggaagaacaacagttttcccctatcaacaatgaccattcttataggacaaatcttatgagaaatggttggcaagtcggaaacttttgatatttccatgcattggacagcccgaaaggtctattcaacctcttttctcagcatatttaccccctttttgcaccttctagtcagtcaaaggacgattttgcacgggttgtatcggacttctgggctcccgatgttgaaaaggtgttagctgccaagcttcgggacaaggaggaatatgaaaagacgcttcgccaaaggttcgaggatgctgttattaacgagaaggatcgggattcagagcattaagaggagtttcggtgtttctaacttggcaaaactcatgtatcagaagacctttgggagttcgactattacgctggagtttgatgagaaaaagaatgttatataatctatgctcaaacacgaattagggtgaatatgcgacctccgattgaataactacccttggccaagccctaactgtcctcggtcaggttgtataggaactgcgaagggcacgtcattgaaaggttctcagattccactactccccaactgtcgagatggtcagagattgtcaataaaatagccctctacaacgggtagtctacgtaattcaagacatatatcaaggtaaaaccgttgaaaaataacgtaaatgttataaaacagcgaagcattccagtgtgcaaggccggaaagagtaaaatgttgtcaggtgccccaccgaaagcgtcgtcttggcgtttttggggagcttcggggtctgtctggccttttggattcttatgattctagacttaacatctctttgcataccgttatgcttcatataccaatgcgtgaaaatcacaataaccaggcttccactaaggctgtgatcttggtgagtgacgaaatcatcgcaataaacaataactgacaccttgtccacaggtcggaggcccctcaagaggcactcggttccgcccattgtcgctcgatgtgccgaaggtatgcatctacctctgatttgatcgttcattggaatttgcgccggacaaaattgacaccgcaatccccatagcccctattcgaagtcgctggccaccccatcatccaccactgcctgaaggcggtggctaaggtccccgatgtacgcgaagtgatgttggtcggatactacgatgagagcgtattccgggattttatcaaagatgcctcgaaggaattcccccagctccgcatctcctacctgcgagagtacacggcgttgggaaccgcaggtgggctgtaccacttccgtgatgcaatcctcaagggcaagcccgagcggctgctcgtgctgaacgccgatgtctgctgctcattcccgctgggcgagatgatgcgcctctttgaggagaaggacgccgaggctgtgatcctaggtacacgagtttcgaacgacactgcgacgaactttggatgcatcgtgtccgattcccacaccaaacgtgtgctgcactatgtcgagaagcccgagtcgcacatctccaatctgatcaactgcggtgtttaccttttcgctaccgagtgcatcttccccgccattcgcagcgccatcaagcgtcgcaccacccgcccccgcctgctctcgtacccctcctccgacaatctggaatcctccttcatagccgccggggacgacgaggacgccgagaagagcgaggtcctccgtctggagcaagacatcctctctgatctggccgatagcaaccgcttctttgtccacgaaaccaaggacttctggcgccagatcaagtccgccgggtctgcagttcctgccaacgccctatacctccaaaaggcattccaggccgagtctcctgaactcactcccccttctgccaacatcgtgccgccggtctacatccaccccactgccaccgtcgaccccaccgctaagctcggacctaatgtctcgatcggcccgcgtgtcgtagtcggcgccggtgtccgtatcaaggactcgatcgttcttgaggactccgagatccgccacgacgcctgcgtcatgcactcgatcatcggctggagtagccgtgtcggtgcctgggctcgcgtggagggcacacccattcccgtggccagccactcaaccagcattgtcaagcagggtatcaaggtgcagagtatcaccattcttggcaaggagtgcggtgttggtgatgaggtccgcgtgcagaactgcgtgtgtctgccttacaaggagcttaagcgggtatgtgttatctcttgttttttccatatgccattgactaacgtttcctgtaggatgtgtccaacgaggtcattatgtaatatgagttttggtcatttttggttgatatttatcgccctgatctcctcgttgatacggcttcattgtcgggtttgtctcatctcgtcttatcttatggttggatggttatttgcttcatgagcgtggccgatctaaggatctttttgttttaatctatctagaacgaacccaaaatgaaagagtcgttggatttttttgcattactatctggtatatgtgggtttcgtttccctcgtataattgtcacatatcccagtaatcgagcctgagccctcgaaacgccatgcacccgaaacacctgatacaaacgttcagatataacccccagatgaatatcatgaaatcccgcatgttgtcatcaaagcaaagaagaagagaagaaactccaagtaccaaaaaccactcagcgatacatagcaggatcatacccagtattctcagcctgcctctgatgtccatcctggtcataagaactaaagtgcactcgaggggcggcacggtgattcatcccgggcgcatcatgataataattctgcgcctcaccagcaggcgcatgctccaaattgtgctcataaaccgggggcgcttgatcatggccgtggccataggcaccgtgcatcgcggggggcacattatcataatcgtgcaaggcaggggtggattcgctgtggcggtcatccatcttaacgtcgaaggcgtccgagtcaccaaggccaggatgggatcccattggatcgtagacgccgagacgggtttggcgacggcgcactaccacatctagccagaccgcggcgatgtagctgaccaggccgataacagtgaatgtgaagagggctttgtagctccggcatacggcgatgccagtcgagttgccccagtaggttgttgtgcatgatgttgttatggtgcttgccaggctccagctcaggagacccaaggatagcgcccagaggattgtgaggaggatgttgagcgatattgagagttttgttgataggccgcagctgcagtggattattgaggttaggaagatgttgaggagggagaggcctgatgcgacgaagagctagagggttttatgttagcgtttatcaataagatgggtatgttatttaaatggtcacttaccaccaggaatgaatatggtagtttgtagccatcggcgtggaggtggtaggtaaacaccgccaagatcacccctgtcacgattgaggagagggagatcaggaagcggatgagatgaaatggcagcggcggatatgccgagggtttgactgagggtgatcgcatggcgagatgtggaagatgtgaagatgaaagaaaagaaatcagccagagaagccctacagtcaacaccctgatgatcggcgctccacttgacacgtttgggcgtgcgtcatgtcgctatttttatatttttcatgggcgcagcttgcatcttcgtgaaattgtttcaaataagttgcatattgaattctggacatattgcaatagaacgtaggagatcaagtatcaattaacttcaatatctttcttcaataatcgaaatccccatcaaccaccgttttccccagccaatttagagccattcgcctcaacacaacacccgcgcagagatacaaacatctgctagcgcaaggtctaagtgttcggcctgcattgcatccatcgtatcatttccactttccaccccagacaactggatgcagtcccacacctgccgatcggctccatcgagctccacatggtaaacaaagtcgttggtaggggcaactgtggtcaccgctggaaaccatcacgcatcggcccttgatcattgctcgggatggaccgaaatcaccgcagctgggagatatccaactctggaagatgttcgagaaggagcgtgataccaatatcaccagccacgtaggggcgatggactttctggacacaagaagcttccccgacttgctcatttacgtgaaagagatatctggtaatgggaccatgtcgtcggactatggtctcgaatagatcggcgggtttatcgcgaccggaggaagacacgataaacgtctgaacatagtcatcgtttaggttggttgggtcgtcatctcgcatgtggctatagcccatgaaatagcagtgggcctgttaccattctaccatataacttggctcttcgcgggttctctgggtcgattgcctgcctcgagtccatgtttactttgtaggcatcagtttggggtcgtatttgctgtccacctgtgtctgaagccctatagcgattcggtaactgacgtttaaaagcccactgtgccgcgccatgtggttgatcatggctagtcttgggaatccaatgtacccagagcaagcagtggggattgttgaacaagaagtgcagctctcgggcccaggtacagcgcactcggattgtcgccgtgagggacttgaagcaagatgacagggtcacctacctaatatatattagatatatcaccccacagctacttagaacgaagcggtttccttttaataatgtcaatatccctagtatctcaagtaactatcccatttctcttttattaacgtacatcgttgctttacatatcaatttggacccctcaagagcttgtatagtaacgagccaatcagaactgccgcgccgcgttatcgactctctgccttcggggaacttcgtttataaaaacaacctacaacacctgcacccggtctccatttcccttttacagctcaatcctgtgcaacaaaaacaaacaatctcataggtgccacagaatacacgggctctccccgcccacattcctttaaaaacagctatccgaaagcttgcgagtcttctatcccccaccatgtcgacctacgaaagtacgaatccccatctctcaaatgaacctaaaattctaaagctaacatcattccagtcgaacacaacactaccgacccctcaacggccccaaccgcgcgccgccgccgccccgacctctccaccttcttctcaaccctgtcccagatcactccagctcccgaccacagaccccatgcagtccccgtcccaggagatgtgagcgcagcattcttctctctcgcagaggcgttggatatgatgcgtcgcgaggccgattcagcgccgcgccccgacgcgcaggaaggcaccgactcagataccggtcgcgatctgctgaccacgatgatccagtcgctgctcgcgcaggcggatatgccgccgcggaaggtggagggtgttgacgaggaattctgtgatagtaagaagcactcccctagctcgccgcgcccatcaacctctcccgagatcagcggggtattcctttgtccatcacataactaaccactcttggatctctttagtgctcgaacgcgtcccaaaagcatccctcaaaagctccgataactgccctatctgcaacaaccccttcgtggaagatccctacccgctcgtcgtccagctgccctgccacccgacacaccgcttcgatctggaatgtgtgcggccgtggctgcggctgcgcgggacgtgtccgcttgaccgtgtggactttgcacagcagcagagagacaaggcggaggcgaaaaagaagcttgttgaggaggatgaggaggaggaatgggatggtatgtatggctgaagagatcctacacgagactatgtatctaggtgcatcgtgaactgtcttctgtaatggagacgagactacatggcagtattgcctatcttagcatgagtgaatgactgttgcatctgtcgatcatgtacattttgatcgaatggatattggaagtaagctgaccggccaccatgttgatcgttgtgcctcttcgcccttaatccatatcatgaccaattcctcgaatcctggtttaatgtgcatattcacgaacagtctgtcaggttttggctgttagatgtgattctggagctgaatcgcttttgacaacgtatgatactcccgagaagacgtaagccaccaaacagatcaataatgtaaaaatatagtaaaggaggacaacaatggtgttttgctgtatgacctatacgccttagatccgaaaatacattggcaccttcatttcgagtcaagatcgagatacgcctatccacgagtcctttgtttcctcgttagctttcatactctaataactgatagtactaattaagcctgcttcaaagacctttgtcctctctttgatcaattttttggacagcttcattcattcctttgtctattttttgactactttcctaacaatgggcatacaacttcatatgaagctgcagtcctcgtgggatcttcccgctgctcacatataaatatcaagtcctcaagacccgattcatctcatttatcattccagtagacattctcttcaagtcataccatcttccactgtactcacagactgtgacaggacttcttctgcggattaccacatattatcgggtattttctactcccattcctccctatacaactttatctacttgcttactctttaagttactatcaccacgtttatgaatctcaaccacaaattggcaatccagatacttatcagtgagtatcccagcctatccaaccaccccaatgtctcccccgctggagactctcgcgcttgttttcttttttctattactgggaatgaccgtcatgataatgatgattcttgtcaaggaatggaccgagtaccaagctatgcagttttggccgaaactgcgtagtactcgcactctcgatctggagtcgggcctttatttactaagggacgtaaaggaactgacatggcgcgttgagcagatagaaactgattttggtcgcaagatgcacctcgctgaatacttgtgtgaataccatgatcaacccccatctgcttaaccgctttataactgtcagcataccttccgataacagacgcaagacgcaaagaccgaatatctggatgcctcctatgcgtagggatagcgcatgagatactcggcccgagtgggtcaccccagttctctaccccatactcccatgtctttcgaggcggctcaccttgatggatctagagtgggtagggttatagtactccgcagtacgggcggcttataactttttgttgaagccagatcagtttgaatgtgcctatggtggatatattacgtcaatatctaccataggcgctgttattgttcattttagtcttggagccgtctatgaaaatagaaaggtggagggaggattatagcgactttcgagtaatagccaactcaatatccgtagtcctggtaaaaaggtcggataaagacagctgccaagatactctgctagacatattttacaattagtggctgctttgctggtcggcggtagaaatcatttgttaaacttggaatgtataccaccttagtccagtagggtctatatgaatcatgaattttacagaagaaaagaattgtaatagtccaaaagtatttcagattttccgtctactctatgtacagtattcggtacagaattcatcacacgtaacttcaatgcttcataaaatttcctcagcccgagccttggatcggatggccaacttgcctgcctggttgatcatagcttcatagccgcttcgctcgagcacaccgccatcattattgacaacctcacgagcctcgagttcttcaacaaggcgctgattctcacggttaccctccagcaagaacttgaggcacatcacagcatgttctttgatgtatgggttgtgggcgtcgaaagcggtgcagcaaagaatcgcctccacgccgccgtaacgacgaatctgctcttggacatcgggacacttccagacaagcgaggagagcacaagcacgaccagcttcttgagattgcgccattcaaactcagagggatcctctgtgatcggcggggactcaggtcgagagtcgacgctgtcggcgctattgtcggcagggtctgggtcgctagggtcgtaaggacgttcgacagcaacaggggctggaggactagcgtcggaggcatcgtttgcggtgtcgtttcggggaggagggggagggggcacggagccaaaggacaattggctcagctggcccttggggatgcttgcttccaactccttgatcaatgtcaccaaatcatagacaatctcccatttaaccagcaggttcttccagtcattgttctcggtcagcaccgcgaagaactctaaaaattggtagacaccttcatagacccgttccatatcccatagattgagcgggaagtcctcagaaagagcccgctcggcgcggatctggccttggagatagattagagcacaagtctcggggatgatgttaccacggaagatggtgaagatgtatcggacagtgaggatatcaactcggttgagcgagctcgggttgcgagggatattaggttgagccgagcctgtcacagacgcaggagagtacttggctcggaagatgtgggtaagtatcttgatcacaacagcctgggccggagagatgatgtccttaggctggccgaaatccgagtaggcatgagacataaggccattcttaagcacggcctccatgatctggaccatcatcttgaagtagagctcgtcgtcgggaaggtcccatgccgcaatgaaaatcagtagttcacggagtaggttacgtcctgtctcctgcgtgagcagaatatgacagcggagcgcttgcatgttcctagatccattccgttcgccgcccttgaggccaaagctgtccacaataccggcctgaacaatcataggcaaagcttcgatttctgccggtccaaggactagagggatatctgttagaagaccccgctgttgatcaccaggacggccacggtattcgtcgtcttcctcttcttcatcatcggcttctccgtcgacgccatcgtcatccacatcatcctcgccatctccgtccacgcttccgtcagccatatgatccaggctgtgtgaatcatcatccccaactgtgtgtgaatcaccgtggtcatagtcgtgctcttcgtcgccatcgatatgtgatggctcctgaagccgagccatgagttcatccttggcctcttggagggtctcggcagccgattgagctgaccggggcatactggtatcttcatctgtaacaggtccatcgacagcgccaaaatcgttgatctctggaagatcagcccagcaaagacgagggaaaccagccgtgagactgcgatcaatagtcaggatggtcttcttcttggtgatttcgtgttcctcttcttcctcgtcgtgttccctgtggtcatcgtgcgcctggtcttcgtggcctttaggatcctcgtgctcttcctcgggaagcgcagccgggagctcacgagcgcggtcctggagatcagaccaaccgtcaaccttagcccctagtatcgcagtcaaagcagctctgatatccttgacctggtctgggtctctgcccatttcttgaatagcgctgaggtctcgccctaaaatcctctccatgtgatccttaatgttggccagaagcagcatggcagcctcttccttgatagttgccggctcccgggggaacttggcgatagtctccaataacaaatcctctgcagtttggtcgtaaagtgcgcgaatgggcgggttgatgacacgctctccaacttgtacaataggcgccactccttctcgcgagctggcatcgtccaaaggctccttgggttttatgatgttcgtatcagcggtcgaatggtaaccaaacagatccagccagagaaccatcttgcgatgctcattgtgcataataaagttgtgaaggtactgtagacatgtaatcagaaggcgcttatagaggttgacgactttctgccatcgctcctcgttccgcgcattttgctcgccatcgaagcctcgagcagtcacacgaacacatgtgtcgatgagagctagaatcctttggtcaaatccggtttccgccgcgaggttctgtgccttcttggttgtggcgaggagattgcgagcgattgtacacagatcattcaagcgctcaatgtctttgaccagtgagaaataattgtatgcgatcagatttgcagatgagtgttcgtagcttgctgcggggcttttccatgcgaaagattgggactcaaggacggggattgcttttgtgaggacgttcgtgagaccttgccagatatccggcgacatgccgagattgtgactagcagggcgcaacggattagtatacaaagcatgcaatggtcaatgatattgcgatcataccgaacatcgctctcctggtgtgtcttgtacaggatctgcttcccagcggcaagcatgtgctccaagcgcttgtcatcaatcatgcctcgaacttcgtagtggctcagtgtccctgcaaggattaccttgagcatgagctcagctggcgtgcataatggctttggatctgccatactgcaaagaaaactccagctgtaacgcgtattccttcaaacggtaaacagcgcggggagatcagagtgggatgaagaatctaagattcggaggtgtggagagacaaattttccgcccgcacgaatgttatcgttatcgcccattcgcccattctaagctcccagggctattattacgctcatagctctcttattggagaactcagaccttggaaggttccttggacgtatgttgtatacttttaaggtaaaagtgctccaaattgcctataatattcaaagtctataaactagttgataatactctactagtgtatccatggatgctccatagtatttccgtggtgccgaactagtacattttctatttagaaaccaacaagaagtacagaattcgacaaaatagtatgaaaaccagataaaaaaagtcagtctaaaatgacaccaataagacaccaaaaatagccatatactagtccaagatcaatggttggtcgtactactattattgtgaattaaaagaactatatatggttcgtgaaggcagtgattgaggcggcaaggtagtgttcaatgagagggttatgaatcggtggcatagctatttaaactcatcgccttttaagcatagtctcactttgaatgtcgacaacttgtagatagcgtcttcggaagtatattttaaatattcctttaaatcaaagttcaaactccacagatattccacacaaagaggttaatgccggatatctccttagattaacggacagatagtcctatcacgtcccgaagattataccaaaagcccatatcgtagatgttgtcaatatctctcatagtatgaattcgcttccatcgagggtcaggaggtatgtctgatcctggccgacgagcaatgcaattggactcggaggccaataaacatccttcagttgggggattttcatcagtgacaaggatttgatcagtatgaacaggccacagttgatcatacggatccataggaagagggctgtcgaaaatgagactccggtttgtcttgaaaacgaagccgtcttccacgtcttctttccaatcggtccactttgcactctcattggttgtcaccccagcccaaatgagatatgtatggtacgccaggaaagagatcgacagcggggcagtcatcaccatcagtagaaatactgtcccaattttgggatcagcagcgatcacaataccccatgtgttgatccaggttgtccagccttgcataacctcctgtatctctggcggaaccatttgcttaagtgtcccggagaggatggaatggccaaggtaggagccgtagatcaacatgacagaaagggagaccaagagcgagatgaagtacacgcaattgttagccccgacgcagttcatcaaccatacacagtggtggtcatgtcgagaaatacaagcgcgacagaagctgcaatgcttgctgcgcgctggcttgaggaatttgcaggtgctgcattgatgtcctggatgaaaaaggactcggtcatacggatagcgtctcatctcttccgcatggttctctgctgtgataaatgacttggtcacaatacacttgtacagcaggaaatatggcaagctgatagttgcgggtacccagagtcgatgaatgctcgaaagccgaggccacgcagccgggacaaagatgccttctccaatgaccagcaaggagacaaagaagatctagtatgcatggtcagtatctatgtgcataagtattaataaattcagagacccaccaggacaagcgggtggttttccttcaatacatagctgccagatcgattccagcatcgtaatacccttccgccgaacaagcgattatcgacaatcgcaattccatttggaaagtacacccacagtaccctatgcagccaggcgaccggggttttccttgagcagtcagcgcagagcttcaagagtttctaagttgccagatagctcaccggaaagctggcagcctgccaaatagcgcgataaaggtgaaagccgagaccgccagtatcaccagaccaacggttctgagggcccccattctgaagctcaagttctatcggtaagtccaaaggatatacttttctgtctgcatcttctggcggtatccttcactgttcctgccttccttgactcgtggtcggtccatgcggtctcatcgaaagtcgtcggttgtgtgtaagccacgtgaccgcgttctcagtctcggcgcgaaccgacggtttcagctatgacccttgtgaattgagactgccggaattacatatgatcgaatacaagaactgacaattggctcagcgagacaacgcctgtctggtaccatagcccgctgctgaatgggggaagagccccttgcgacacgtcaacacgtgataccgcgtcgcagacaaagctggcctactttagggcgtgaaagctcgaggaagagctttttgcggcttgatttctgagaagctaaaatggcaactttcacaaatgactcctctcgggccgagactacggcaacgaatctgtttcaaggcgcacgattctggctatctctcactgttccacaaaggtcgaggtttaaagaattaattaaggtacttcgggatcaatttatcttctttaaagcttgcagaggttaatgggtatctagcaatatggtggtaccgttgtgctgatggagaaggatgccgatgtgaagctggtggatcacacgagaaaagacctgcctaaggacacgtacggaacacggaactttactcgctcaagatcagtgtactaattcaatattagattctcatatcgatatgtagagcgttctatcagcaagggacgactcgaagatctagaagcgcaccgggttgggccatctgcacctcgtccaatgggtgcatctaacattcccacgaagagcacaagatcgttctataccctgaaagaggaccaaatattgtttgactgggtcgaaaactttgaacaagagccaggggcgcctattcaaggcaataaaatttaccaagatctaagtgaactggtatgatgctctcttggttctgtcaaggctacagggcacacacatctaaatccgatactaaccggtagggcatagtttcccgctcacccatggcaatcctggcgtagtagatacatcaagcatcttcgtggcaaaggccgtccagggggcggcaccccattatcatatgacgaacttttacagtctgcaccaccccaaggaggacgcccaaagatcttacctgcccgaatttccctaaatgactccacagcaaaatctagctcaagggttcctcggctggcaccccctgctccggcccaagcaagtacagcaaacagcccaaaacgaaaacgagatccggtccctgaagcatcgaatcgaaagcggctggatgtttcacctacgaaaagaagagcaattgaagcttctgacaccgtgggccttccctcacgccgtcccaatcctgatatccggagaccccaaccaaagtcatcagatgtagcggccacaccaccctttactacacggccagaaagaggcccacccggtatcccgttgtcagataccggaccgcttcaaggccttgggattccagaactctttccagtcctgaacgcttccatacagagccctagccgcgtccctcgggagacctcacaacgacaacgaccagcagatgtagcagccccgccagccccgccagccccaccgcggccattgggggacaatgccttcgcacagtctggccgattcaagaaacaagcatcgaatcctaaaccacgagtcaaagatatcttcaaagacccagtggatcccattttcctagagctcccattcttaccatcaagcccagcatccgagacgactgacgatgacacctcagatgtgcccgacgttgatacttggattgatcaacgcctggctctaggtgccaaagaatcccacgtgttcgatgctctgcggtgtacaagcatggtcccagggatggcagataaggttctcaaatacctcaccgctggcaagggtattcccgatgatatgccgggagtctggacagcagaggatgatagctgtttacaagcggaggattattcgcgggtgcggcgagtgttgacgaagcacggcgcagaagcgtacaaggatagatgggaatatttcagcatggcccggcagacaggacttattgaataattgaataatacacatgaaatgtggaacttgaaatcacacgaaggatgactacaatggacgagttgaaattgtgaagtacatgaacattagcgtgcagctagaaacgaaatactccccgaagacaccggtatgacctgcccagaacgcaaagaggaaattggaactcaaaagtaaacatcaatgtaagggaagcagtgccatattcaaaacgcgttggtcgcagtagagggagaattgtagcgatggccactcgctattgcacatccgaaattgaagaaacggcctagaaatatcacatgtgtaccagtttattggtgatatatcgacttgtcaatgagcaggatagatttagttatccttaaagacactatgggagacgttaggaacgaattccgagctttcattaggagattctaactcacagatgcgattcgtagaacttaagcatctagtttgatggttagcatctttatcgctgttttggcacggtgtaagaaatactttcagaggacacttttcatagcaggcctggacggacagtttcgccttgcgtccattgttgaactcgagccacgccatgagacctgcctcgccctcccggacaattgtatccaccgctttcacttccttatcccagttcttcccctttggaagccattgaatgccattttcttcggacgagtgggaagcttgactggttgtctccttgggtgctgattttcggcgctttctcttggcttcgctcgctgcggggcccggtgcaggcttagcaggcttcgaatcacccatagatttgcgcttgcgacctggctttcctgccacgcgtggctcttcgggcctcttcgggcgaccaccgatcctctcgtagtatgctgtgacaatatcggaggccccatccctatagtgtttgtcaataaatgcgcgaaacagatgtcgaagcccaacaagcgcacaaacttacatgagaccactttcctcttcccatgtttggtcttctaacttgtcgtaacccttccatttcacgaagagcttaaaggttccctgtagttggttggcttctcggcacaatgagactgagcgttgtgaacatacatcatcaagccaagcgtgatcagtaatatcctcgacgacgtagctgcatccagtcagagacatgtatcgatcagtcggccgcaatgcgcaactaacagtccttcttcctcatcctcatcctcatcctcctcctcttcgtctccttcgtcccgggagtcatggaagtcacggtcgtctttgccatttgcttcgggtccatttctgtaaggaatgtcggcgacttcttcgtcggatacatcttcaatgggagctaaggaacgaatgaggtcaatcgagatgctcagcattgcgcgtgcgacagatcaacattaggagaaaacactcacgaggcatgtttcggttgaacggtgagatgagattagagagtttggaaaacagattggcgattagaggattgaaacctcaatggcaacggtaaattcaggcgaaagactgtcgcatccagagcaatcgagacagtcgagaagcagaaacgcgttaaaggcggacaagatacactataccgcttttggcagtcagaatttcatttgtcaaaagtgcatttcgggaagctcccctcaaggctcagcttgcaagttcacactgctttgtctttttacttactcttcattatttctcgatctccttgtcgggttccctcctttaataatctctatattttgccaggtggcagcccaccgtcaacatggcaatgcgtaaggccgcacccccatacccctcattcttgaaatgtgctgtggctaactatgtggattttgatcttcaacagagcttgatatgtctcagggtgattactcctcgaataagatggtgcaactacgattcggtcgctgacatcaagggacagcttcaatcttgaaggatgagcagggacggccgtttattgtcgttcgggagtacgttcaccgctacgctttatcctccgttttcaaataccattgagagccgaaaggttgagacatgaaactgacggggattcttttgaaaacagtcagggaaagaagaagagacaacatggcactgaggccgttaaggcacacattgttgccgccaagacggtggccagcattgtcaagtcttctctggtatgacagtcggcaagcaatgaatggacagatatctgactctcgtttccagggtccccgtggtcttgataagattttgatctccgccgatggcgatatcaccgtcaccaatgatggcgcaactattctcggacaggttcgaccctgaagtccttcccccggagagatccaattctggctcgagagactgatgcgatggttacggttagatggagatcacaaacaacgtcgcgaagctgctggttgaactttcccagtctcaggacgaagagatcggtgatggcacgaccggtgtggtggtgctggcagcggccatgcttgaacaagcctcggacctcattgacaaaggcatccaccccatccggatagccgacggatacgatcaggcctgcgaaattgccgttgccgagctcgacagaattagtgacgagattacattcagccaagatgataccaccaacctcctcaaagtggccaagaccagtctgggcagcaagatgtacggattcttagctgtatattagttctatttgatgctgacggtttccatagtgtctccaagtcccacgatcaattcgccaagatcgctgttgatgccgtgctctcggttgctgactttgagcgcaaggatgtcgactttgagttgatcaaggttgacggcaaagtcggtgggtcccttgaggactctctgcttgtccggggtgttattatagacaaagacttctctcacccccagatgcccgacgaagttcggaatgccaaattggccatcttgacctgtccctttgagcctcccaagcccaagaccaagcacaagcttgatatcacatctgttgaggaattcaagaagctgcaggactacgagaaggagaagttcacagaaatgatccagcagctgaaggaatcgggtgccaacctagtcatctgccagtggggtttcgatgatgaggccaaccatcttttactccagaatgacttgcctgccgttcggtgggtcggtgggcctgagattgagttgatcgctattgccacaaacggtcgtattgtgccccgattcgaggatctgacccctgacaagctcggcacagctggtattgtccgcgagatgagcttcggaactacgagggagaagatgctggtgattgaggagtgtgccaacacccgcgcagtaacaattttcgttcgtggaagtaacaagatggtgagtcaaaacctgcaccatacgtagggagatgtgccggtagctaacttctgctacagatcattgatgaggctaagcggtcactacacgatgctctatgcgtcgttcgcaatttggtgcgcgacaaccgtgtcgtctacggtggtggtgctgctgagattgcttgttctatcgccgtcgaggacgccgctgtcaagagccccggcattgagcaatatgccatgcgtgccttcgctgatgcgctagatgccgtgcccttggccctttccgagaactctggtttgagtcccattgagacccttgcctctatcaagtcgcgtcaggtcaaggagaagaacacccgtctcggtgttgactgcatgatgactggcaccaacggtacgcttctagacaaccatttcataccccgtcattttcatcggctaatttgggttctgtagatatgcgtgagcacttcgctattgaccccttgattggcaagcgccagcaacttctgcttgccacccagctgtgccgtatggttcttaaggtactgctcccattaactctttctgtcgcgctcgatgctaaccgtcaatcagatcaacaatgtcattatctctggtgatgatcagtctgagttctagatcactagattctagtcctattccacgatggtaaaagaaaaaaaactgatgattctggtttgctatgtaaaaacatggtcccttacatagaacccttttagtttcaataaaaacgaaaggattgataatgtctctatctggtcactgcttctgaccttgctcttgatatgggcctttatacctacatctcgtagaacgccgcagcccagaacggcatctaattcgaacaatcaacatgagcgccatacgcatacgcaggtgaacatagccatacacctattggtacaacatactcatctcgcccatgaatcccaaataccggtatcatcccttgtgcctcgggttcacaacatgtgaactggaagtccttaccgaaactacagcaatcgcgaaatacataccagtccggtatgtaaaagcaacctaagccatccagccaggagacaggcttgttccgtaggagatccgtgcttccattcgggatcgtgtgggattgtctgtgttcacgagggtcacccgatatgccgaggaacaacaacgtacccataagaagatagacgcactcccaccacaagatcaactgacttattggcttttcggagcctggcttccattccccctcggtgcgcatttgtggggttgccgattttttccgtcatgtttctttcgcaataaggtcttctagactaatggacgaacggacctaagtagctagtgacatgtcccattatggggatatacatcgtgtggttgcccggatacgagagtgaaattctaatgtttgaaatcggcatcaggcagtcgacgtatactttcttttagacagcacctgaagccttgcgtgccaagtttaggtcatgatgggcaatgcgttagctccttggactttgtcattatgtattctcattcccactcacgactgtcctcgggatttatgcgagcgtcagtgctaaatacgactttttctctttccttcctaaataaatccttgtggggcgaagatgagatagtctctgcaggcacagtatagaagcccccactctacgaggtagcctgtacgacaagaagattccgatatcattactaaagagtagttatctacgcgctattcatacctgtagtgtcgttttaatacaagttatacaaattcagaacaagctcattgtcccgaatgtgttgagttgtcgtgacccggggaactacgtcgagaaacaaagtgtcggcctataggacggactggaattgtgaattgaatataaactcgataataatcatagcttaggcaattgacagagcttttctcggaatgacgcccgaatcagaatttgacggtgaaggccgcgtactaagtctcagtcttgataagatatatttatacttctaaaaagtgtagaaaggatgtcattatttccaacatctttcagggcgtagaggaagataaaatattcttttcttttcccggtttcctcctcgagccggtatagtagagctttcaacttcttgtaggctttcagctgttgattccaaggtttcacaatgcatggaagtacaaccccagttccccgcgattcatggaccataggattcggaattttgctagttactacagctcaactgagggcgagacaggcctagactagatctattttctctctttcgtttcacatgtaaactcttgacattgggagctggctatcttaatctggagtgttgaggagatgccctcttatacgtgtgagtttatattgctgagcattgaaaatgatgggtcacttcggtctagacggagaaagagtcaataatctgatatatcgcttagccagaccccatatactcagacacaatagtgccaacagctatccgtcgtattttgaaacaccagctgcgccagaaagccattgaactcgaaatactgtattgcaggacaattccaaagcaaacgaagtaatagtaaatgccgtaaataaagaccttataatgtgggcatattaatatattcataccacagctgcattgaggattcctatacatagcatacacgatttcaatgcatcgcatcccacggcagatcaatttaaagtcccccatgacctgcagcgggtcgtgttttagagtatcttcattggaatatgagaaaccgggcggcagccgccaccacaggagacggacgtcagctccagcatagccgtgggtgagtaccctagggcacaacgtaccctgcttagacagattatgtacttttgtacatggattgggtcgatctgggccgaattaaaatccatcgttgtggtgtgacaccgctgacaggtacgagggcaagccccgatctggcgcccattttcgtggccgggattatattacgtgggacacgcgggtctgggtggttgtgctggcctttctgtctttccttttagtcctcttgtatattgtggatggagagggatggatcaaaggtacgttgctggtcggcgtgggttttttctatattctgtgccctgcgttctcaatacgactggactgggctacgttgcatggtcctgtaggagagtagagaatgtcttatgtatttttttctttttttctctctctcggtagtcgacatagccgcgctatgcttgaagaaaacttctgtcggacatattgtttccgcagttcagatgacccggtactggcagctctatgtggaacaagatgcgagaagtagcatggtccagccagaatcgagacgtcggtaaatatagatgttgactctaaatggcctcggaccgagttaatgtcgcgtcagcctcatcagtgctagaatacgaatcacccaggttgctcacatgagcatcgtggtttgacgtggcttcatttcgttcgtagtagtctagtattgggctcttagacgtgttttatcttcccgtgacagccgtttgatgtaaattgagtatcttcctcggctcctggtgcaccactgccacttcccatatatggtcatttagtgcttcttcggggaatcgttggtctcgtcacacgacgatggacctgttaaccatcggtatatcacaaacccagtgatcgctatagttatccgagtttcatgacaattcgactgccttcttcggtctcaccgatctatagatgcttgcggtctactccgtactaaattttggaaatttggtatagggcacggcatgtattgttcaaggagtgacaacacttttcagaagtctgcattatctttctaattgtttcctttgtctgtaatctatttgcggttcgataggaaatagtgaatggtttgccagtgagtgcgttggccgaaagcggctttccatggtctggggtccccttaatgtggcttccccggattttgatccccgcaaaaggttggggaccttttgtgtatttgatagtttgtagtatggcgggagtcgacatattcattccaaaacataagttctaaaaaaaagtaatggtatccacctatatgccgaatgtgtacggagtactgtaaaaatataccgcccatccgtagctttcagcttgcaacttatcttcaagcctcaacaaaacatgtttgattaggtgtatgtaatagactttatttttagtcgatatctaaatattctgcgacccaacacagctgacggggaagcaggtgacaaacccggatacattggcttgatttcaggaggctccagatcagagcctaacacactgacaggtgcacagcacaaacgaaacataaaaatcggctctaagactttaaacccaacacctggtcagcatctacaatcagcagtgacagaatgccagcacaaacgatcaaagatatcaatcgatcagctggcacatggcgcgctgtcaaagaagccacagtgacaaccgtacaggagaggcttcgttcccaatcaggggttcgactcctggtggcctaggctgcgtgtcgatgaaaccctccatcttaaccaaaatcagcaaccaaagacagcgatctcagcccatcgcccgccacaatcacacgccgagagactccgaaccgagagatctttatacacagccgctacagcccttgtgggcgagaaataaaagcaaagagagctgtcagaagatagccgccctaaagtagccaccggatgcacatggcccgatgtagtcggcttgcattgtgggggttgttattggccaggcaacctaggatcaccacgtatattatctagttgcttacgcgatacaagagtataaaaggaagaaattgtttctcttccataggtaattaaatatatggatcgagactttaagtcaggtggttttgtgaattggactatttctggtgactgttgtctttgattactttgtatctccgaccatcgcaacaagcaaaaagcagttatgaccttttcgggaaaatgaatggtttgggatttgtacttggcatcaggtttcaacaaacatattctgcacaaaaggaattaattgaagatctcgaaacaggggtctggaagagcaaatatgaaattaaccctagtcatgacaggggctgtttgttaccaactcaaataccagtcaggcagaacaagtaaagaaagagaagaccgtaaccaacattcatatgtatttttttctggattgtactccttatgcttcctcagaaacaatttgcaatgacgaggtggcagatgaagtataaagcccgagtatggaaccttgcacaagctgcaacatcaagggaagtgggcccgtaacgttggaaaaatgagaacgacatgccagggctaccgaatatctgggaagatgatctgcagaaaccatagagtggatatattattgggccacaactccaaacaaggggaattgtcgacgatccgggaccaggggccgcgcagacgagatgggctagacctttagatggtatgcatggatgtgcttttcctttgctactttgtgtaggttgaacgagcaacagaaattacgcacatgaccatctgagcccaagctataataatagttagatgagactgcgatattgaagggcaagggatgttataaaaaacaaagacatacacccaattccagaacgatcctcgtctaggatagggatatattgggtgtcacctgttccagtgggatataatattttgaagccgactactccgtatttgcagagagccaaatgtatgaaagaagccgaagacattcagaagaaaatgatcgtcgcggatatgggaatcctgcttccggctggatcgcagaattcagaaacccacatcccatcttcgtctcagctagtttcacggggcctatcagcctcgcggatacagcaagctttcgatctggaagattccctggatatccctagttgaaggtcacatgcattatagataggccgatctttgcagagtagagagaacagggcgaaaggacacgaacgcatcattacgtacttggagtattccgtacctggtagaagaatatcgcaaatgcatgttgttccgcctcacttggtatgaatgtttctagattgagtttatcaactatccacctgactctgtaaatctagaaaactatgtcccgcttcgattccgctgcccgcgagtatcccttgttcgtaccagtcaactcttaaactagcttacatatagacttcttgctcaaagtctcaagtctcaattaatacgtgaccggtctccttttcataattaattaccgattcgaatatatatatcggacactaagatttgatccgagcatagacatttaagccggggaagcgggctacgaatagagtgggagaaattggagggatgtgattcgctgcctcgttgatgtgatacaaagagaacccctcgggccgtctaaaagtcgcgacatatcctatctactactccgtatcatcgctcaattttgcgatctatactccgtatcaacatccaagacaaagagttacgaggccgacacggcggtaattcgtgatcgccttgacctcaaggccatgggaatgaataggagtaaataattgacgatagttaccctcccgtacaccgttatccgctagatgtttggtcattcgagatggtgacaggcaccggctgtcacattggaagagtgactccgttagtttgttgatgcgaagcacgttgattcgggaccagtgacacatttaagcttaatctgtcgattcaaaactacaggttcaaggtccttttaatgattatttgctgtcgaatccctgatagagctctttgttatatctaggtatgatacgatgggaggtgagtcaatatgctgtatgacagtgatactcgcctgataggggatctagatacccctgcggcttcgagtccgtgtagatagattcggaaagctgatagtatttgttttcgtgctagtacctaggtagctcacatcattattgggtcgggcaggtagctgtcatctcaagccgttgcgcgaatcaatgagccaaggactacaatgacaagataagagaactggagatggggcccttttccgtgtcacatgaactaaggtgattggcgattcatcaacatagcccaaagcccaaatctaggagccagtacgagtagatctcaagagaatcagatggtaaaagacggggaagtcacgagcccctgaggtggcgcggttcctggaaccccacatcatgtgacgagacctgcgcgtgactttgccactttatgagctgtccgttcggcttattatgctcatattagacagaatatggtcattatacctggatacgcgagttgcacggcatgcgattgtgggtactgataccccagctcccgaatttgccctatcaacgctatgtggagctattgcaatcctgaagcgcgctccttgttatggcctgcgcttactccgtacatcaggtgccatctgccacggccctaggctcggtctcattccgttttggcgcctccgtctgcccgtgatcatttcatgacaaccatggtattgtacagcgcatataataatgacacatctgagtctgactggttccccatcgcctgcgggaatccgtttagacctcggtaccctggtatcctatgccctggtccaagtggggcgtgaccttccattttcccagtcccaagctattggcagccgcatccttaacgcgatcgctatgcagcgtgcctgcccaggtggtttaatgaggtatcttacgtgcggttccacaataccatctggtaccacctgaatagtagccagtgagacagctggatgtgtagacgagtagatgagtcaagagagatgggttctttcattgcacttcgttgtttctcttatcagattgattgtcgagatgacttccataagccatggacttgctgtgtaagcttcgcagataggaagggggtcagcagctatgaaaaaatcaggttgcataagcccagacaatgtttcgcatcctgtagatgattgtgtagtgtcatacatccgcagggttacgtctgttacgaacgaactgttttgaacgaatcagacgactccggtagtttttgtggtgaaaaaaagtgcacagtgattgactggctgatacctttttgactgggatcttctactaaggaaacgaaatatcaaacgaccttcatagagctattccgatgaaccgattttagactgattttcccatccatatccccgcaaatcttattgaagtctgggtacattttcagagtcttagatgatgacagcttacaaacttctatgtcatatagttaatcataccccgtataatgacagggaataacgacttggtcagatcagttacttatataggtaggagcgattttctcttatagtcagggatctcatggtacaatatcacatgatagatgaaacgtgcgcctggtgcgactttgccctgatcggccttccaggcgcccgggtatagtagggaaagatggttcctttccgccagtccgggcctaagggcaagggttgctgtaagcgttccacccccgtgacagaaaatcttcttacgtattctggcctgctgtcaatccgtttctcttcaaggaaaccaacactacaatgacagctggcagactcgtgacgatgtagcctaggtttgtgacactctcgactgtcgtgtcctatttggatagtcaaagatagaaaatctaactaggatgtgtccattcggaagataagaaaagagaaagggcggtaaggctcactccctgcttcaagtgaagctgtggctgactttctttttttcatccacatgattgaggcctaaagtaatttcctagaatatccctcggaatcctcaccgatgagagatgtgtagataaaatatacctgttttgaaacaaagcaatgcatccaaaacggaaaacgatctactatggaagaggtacgctggttccccggcatgcagcagggcttggaactacactatccctttctcctggataatagctgcttgcgggggaaaaagctggggaataacacagatctcagccggaatcaacaaaaaccaaacagccattagaggaatgaggcgcttataggaaagtgtataatttccaccggaattatttatgtttcaatgtctaactataaccttgagctcatgacaattcatacttccggccatgataggctcgagaatgaacgagcctcaagtcccatatcggtgaccacaacgtggcctgggatcttagaccgatccctagtcttttgtacgcagtgtaccccatagcccgaatgtagagcgtccgtgacgaaaatagcttaaacgcgacatcagtttggcaggtcagcgggaccatcgaccctgtcagcaccaataactagcagtttgacagttcatcagtcagtagacctcttttcttacatacaggagtgaagaatggattgtcagtggcgagaagtaatgtccaacgaccattgagatacatgaagtggcgtagagagagccctggtctggacttcgggacagtcactgcaactaccgcgttggagtgttgccgtctttcgatcagtacattttggcattttctttctattattttatcatttatatattttctttgccccgacaggtcacaggcacttagagcattgatgatttctcattctttgatatgaatgtggaagcagctaccatagttcggctttagcactaaagagattgaaattgaagctttgcagggaaccttgatttcaccgtcggacggttcaatagttaggtaatcagtactccgtggatcgaaacagaaactggtattgacattacagaggtatttttaggaggaaggaaaggaaagtctaaagtcgtggtggaagacggttggaaccatggtaaggtgtatccgaatacatggaacaggtatcgatgtaattcagggccccgtgatgcgatagaattttccccttcaccgaccgttatcctcggcctggagttatttcggccttttagtatttttgaattttggattatctctccccttgtattgtcatgttcttaccaaatattcgcaaaattcttattcttttcttaaaagggaaatattccaattttcgattttcgattttcgattttgattttttgattttcgaatttattaccgtccccctctccttccactccactccacaagtgccgccccccgtcattcttattatcgttccgactccctttctcttcctcttctattctccagatccttctaacagttcacctcactctcccaacctacaatctctctcacacccgtcaatctcgaaggttcatctcaatccggtctctcgataccccctccgtttctccgattcttcgccccggaatctccgcacagtggcgctctgacggaaaactgacggacattcgacaccccatccttcctcttgctttaaaatccaaattctttcacgatccgcatctttcgtgtgagcattcgattgaatcctagacgccaaacccgattgatcgacccttgcaacacatctcagggcccagactcaaatttcaaggcccatccagaaaccggttgattcttacgaactttcaccaccgcatcttaagcgccgtacgaccactatcgggggagacggcgaccccggaaacatcaatcaacgattcctcaatcattacaatcgcttcaactgctagttgaggcatcgcgaaaatgcctttaacgacaccagttctgacggtggacgcggacaatatccataaggtggataccgcgaacgctcaaagtcttcatgggatgtggatgggtaagtgacaattctgctggttgagggataccttgttttgctgacttctcgcgcagtcttttcaaaatgtgccgactacatggaccagggccgtcgacttgaaaatctcagttggcggttgtggacgcgcgaaaccttctgtgtcgaaccggaaaagtctaacagcacttctgccctcccattgctacgatccgaagctgcggatttgcccgaactctccgccagtgtcgagtcggccgcgtctgatcaggccgagcgaatcgaagctcacatcaagcgtcccaagttcaacgactaccgaccggctgtcgttcgagaggactcactagcaagcctaggccgtggaaaggagaagcacatcacatcgttggatttggagcggatggtcctcaacatcaaggaaaagaagcaactgcagcctatgccttctcacgtcgagcctgctgcccccgttgtcgacatcactcctcgcccatccacccctactcctccttccgtctctaccgctcgtcaagttccgaagttttccgtccgaccgaccccatacccccatgagtcgactgagtcttgctcgacgactgcccccgagggcaacgatagcgacactgcacaggtcaacgcgtccgataccagtgtctcatcttctggcattctttctagccggccgcaattggtcaaatctactagcattgttcgtggattctcaccatcacacatctcatcttcatttagatcgcaaccaagattgtctatcgaccctagtccttcccgtgccgctacacaattgaagccgtcggcattgaggaagaagggaggcatgtttacactgggcggctcctctggggatgacgatgaaagctcatttgaggagcgcatggttcctgctcaggagaacgcgaacggtggagggttgaacccgaaaaccagcaacccagaatctacgaaaaagactgcctctttcagcaatcaggtctcgtcccacatcattcctaacttgaaggacatcagtcgatccgacgaagacgccattgagaccgatgatgaagtctcagagagtgcgattgaagatgatgaagattctgattgggaagattcaatcactgaaggtggcgggtctagcgttgacgatcaaggagggatgttccaacgggttgattcccggcccaacctggtctcgcgccgctcgatgcttactatgatgatgcatcaaccggcccgcatgcaaggaaacgcgttccggtccagccccgcacttcaacgctcgcggttgacctcacccagtggtccatctattcctcagtcacctcctgacagggaagaggaaagcttagtcatgcgtggtcctgatgttccccgatcgaagcctattgtcatgaacaccaacgcctcgcagtctatggcacactctccgcgaaccacccgtcgtaacatgcttgctactgaattgacagagtctctccgccgacatcttctctgggaacgccagcagaagagcgcgactgcgaacgctttcctcaagcgtcgccacaccgcccacgacatgaagaacctccaggattaccctggtcccaagggtccacacaagggagttggtccgaaccaggctagtgctgatgcagaccctaattctgccaactttgacctgggcaagaatggctcctggaccaactacaccactgactacggcccctgggagtaccacgtgaagggatggtagttcattcgctgcgatccacctcacctacgcgcttttcgaatttccacggactcgtttgcaacacagcccagcttttctttcttgacacgtacgatcacgatcatgcattgcatatatggcgcaaatctgggattctttttctttctgctttgtttttctcgatctcatcggctccgggggcctggatgtcatcatgacattcactgggcgtttgtcctgcatggaggttatggaacatcaatttcgagggctattttcttcttacgaccttaatatccatgtacagttcatatacctcgtcccttttcgggtcatcaacggttgatggcacatgggtcttgtctctttgcgtctcgctttccaagatatttccgggtggctttttcatgcccggagagttcaccaaaaaaaggtgttttattgctatcatctatctcagcgctgcgtcttttgctgcatgaccatatttgactgcagaaaacgcctagcatttgtttcccactcccgattatcatcggagaggtagtcgttttttttctttctccgcgatacctgataccacaacgtttatgttttccaattcttcatccggcaccgatcttcgcgatcccgccagaacttgtacgctacctgatgacagctaaaaacaaaaaatccaatgaacgaaatcagagaaaacctgtcctcacctgcatgtcgtatttccttgactgcgggcttagatatcagagaagaggcttgcatatgcctggattggcggtctggatctacgtactgtagtagatagctatagctctgctgcagagaggcacggaggctagcagaggtgcgcacagccattcctgcgataacagtgccagaataatcatgtggaaattcagggttaactttgtggcgctgacacgtatgagagatgagtctatcgcataacactgatacctgtctgcatgtacttattcaagtggtcataatccatttggattaaattgcctaactacgtgggttaaacgatacttgactgtatatatacttattcataatagcttatactgggtacatctacaagtgccgtatgttgtactccccataaccaagaaaatcagtgttgatctacaatcacacccggaggcatccacataggaaacgatagagttacactcctttatgaatcaaatcatcgcatatcccttaatgcggtaccacctgcctagacaggtatttataagagtttagccatggattcatgaatggacgtttcagtgcgaatctccgccgatcccagggcgccaaaaataataaaggtcaggtgggatgcagaaaaaaaaaatcaatacaggggtcagtcaaaaagcaccgcacctaatatcccagggcccgttcggaatcttgaaaaagatgccaaaagtacctatctttcccgagaagcgaacagttcgcgcagatctagaacacagaccagaaactcggatttcttttctaattatggatttgaccatatgtcatatcacggtcttctaaccctgaaaggtcgtgatgttgatatttgatattacaagctaatttaaccccgtacagccccgaagtctttaccgaagagaagtgtccatagccgttccataaccataaccgacccgatcgaccggcgagatccctcggtgcaatcctctttattcggcctcgcattggccctggcacatacgagaagctatgtcatctttgcattagtttacgccagagctcccgcggcagtcgggaggtggtgggcttgcaatcgactcgacaacttaagtactcagtccgcggtggctttctcgccctgcatgttccgcagggccagctcctcggaggacccgggggtgagggtgattggattgggcttgcactgagtggctggcaaggtgagttctaggcctgttgatacttgtatacttttgagatttgtatcttccctgcttttgcgttgaatccggggggcttactcaggcgtggggttgtgctaccggtactccgcacgacgtacaaactactacctactgtcaggagggaatcacgttccgctggacggcctcattatgacaccatgagtaattgtgattgtaatctacatggagatcttttacatggatcttgcctgggttatgcatgttttcatcatgattttgccttcgcttacattttgccatgtcttactggcagtagttgcctgaaggatgaagattgacgtgtagatcttgactaattatcacgttgatgtcattgttggcataattgcgtttccatgtgctttctcggttggatttgcttattcccatgaagagatgtgtgaggcctcgagatgtgtcagagggtaaatcagagtggcgtgcaatgccaatagaaggagccttatggggtatacatcgtaacccttagtatgggggtttaccgggtgtccacagtcgtcatgtggtagctgcacatgaccggtgcacatgatccgggggtggagccgctggattttgacacccgagatctatttctatgtgttatgtcgtacgtgtcttgacctcacgtcgactatcttccacgtctcatctcgtctttaaacaataccaatagacacttatttgacctaacattgtctaacctacgtggtagtccaagtcccgtcccagcaaatgacgtatgtacaactcccttctccaactttgaactgatgtggggatgaagactttttcttcctaaaactcccgacatcatctccattctaggaacgtccccagtctgtccggtcatatccgagccgtggggctccaatacatagaaccattcactgccggagaaacaaaggagaaacaagcatctgacatccaaacgaagccaataacatggatataacagatctcatgttctctgtactcactgaggaaaagcaatattgactcaatatagcccagatcaatacttttatcccaagcccctttcttccatgctgatccaatgacaatgaatcattcaaggtgaaacaagagcctcctctagaaccatcaccaaatctctatacattgcgttcgcattccagcctccatctctagaatccacctgcccagttagggctaactcctccctttcccggccagaagagtctttcttcatcttagcttcatacagcaaagtgggtatcacggtggatcactccgaaccagggacaggcaggattcgctgtctcctttttcaccggtactgaaagtttctaattgacgccgcacggagtacacgcatgacaacttcggctccgcatttcctatttggggcttaatacaacttgttacatacatatgttatgggtaccgcgtaccaacccccacggacccctccacgatcagggcttcaagaagaggcgtcgttggaagaaaaagtggatgtcgcctgcttgctgtacgattgacgaattgacgcctaactggctcatcgggttggtgatgtgcgcccgacgtgcaatcggcaagccgatgcagctgcagcatatccccgaaagctacgatatgcgaggatgcaaggatatcgcgctcgtgagctcgaaatagggcgtcttttcggtgttcaaggatcgagggcacttcgcatgcagctttgatcgctttgtccaggctcttcgatgattgaggcgaattcaagacgcgcaagagtctccgttgatttcttcttgatcgtcctccgctatgaagtgatcggccagccaggacccatacaaaccctgtctaggcctctcgagctctagaacagagccgatccttgctttggcgcggttttattttaagagttggactagctacgctttgcagaattcttgttattcaattcaggggacatatcgaaaatttaagtattagtgcggcaagattcatatcagctgttccaaatcacttcacgacatttgccactacaacatatgcacaacataccacgtttcgtggctgttccgaatgatattaatattcggcgaaatcccgaatgaggcgatcgggattggcccccgcctgttttccctgggccaagaaagtcgacattcacactgaatctgcaaatctcaacacaattacagcacctgtgattggcctgaattattattctaggccctccggtggagacgaatcacgtgtatcagctatgtattccaggagctctgtactccgaaaccccgcaagatcaatatcttgaattgctgccatattgagagaatcaaatagtactacttgtattaattgtattaaacttcaaggaggtatcatatatcccgcaaggcatatcaatatatagaaatgccgacatgagctcaacctcgaaagctgcaagctatgtccatggtcaaacgcgccaacgcccatggaagaccgagcgcgatttggaaggcttctggaaggacgatccggttggccgatgaattccaggtccgattcgcgcttttccgctttcggtgtttatttacggtattgtattcgtctcttacattaccatatttgtacagcggaagcccagtaccgcggagcggagctcccttaccgatgcattgaccgaggctcaacccaagtacggagtatccatggatgttctcggtatattgtactttgtatccttgtagcttgatgaggagtttctgatggaacattttttatcttcttttaagcagcttatcttattttaaatttacagctggcaattagggctatacatctaagacagaactatatcttgtaactccccgagggtttgggctcgatatcagtgggatcttgtcttactagcggtagccacagggcttatgcatagaatataacattagaggtcccactgtacatccgagtgacctccaggtagcctcgccaaaaccatttacgccacagctattattgtgtgggatttcagagttcctccatattaaagtgggatcatcttagtatcactatgcactgtccaattttttgggggcttggctccactccctagcttttcgaaggtcgctttgctcttaccttattaggtacgcaggcatggacatggtcccgaaaagaaaccaagatacatagccgttatatctagtggatcgatgttgcatcccggttaaacgcgtaccctagcaccccatcgcgcaggatggagttctagaaactcgaaagcgaacccctcatctccgcgcatcgcggaccgaccgctatccgtgactggtggccgttgaacatagtgcgctgagcttgttgcgcccgtcgggtcgtattccgctctcggtgatgtttatctttttctctcctcgcatggcctcgccggggctgggtccttgttaaggggatatcccccggcatggatgtgggagataaggcgggtgccgcgctctgcgtggtatatgctctgctggcagatgaaattcggaatcatgtttccctcttcgctctttttcgaatagcttttgtttcatgtattctacatgcattggtgatgtgcaggaagattattgccaatcaatgctagtacttggttggttttggcttcctgttgtggcctcgagcagatgatgtgctttaagacctgcacgccacagcattaggttgggatttggatgtgaaatgacgaaaactactttatatagttgagatgaaattcaatgtgaggaccatgcaatgactatcattaagatttgtgagcctgcacttgtacattgtacaacatacgatgaaggcattagtgaggactggagctggatagggagagtccatattagaacatccccgaacatttggagatcttcaactagaaacctccatccacctgggcaaatcgattcattgtgactcacagctcacagtatgactggaaatgagtgaatgtcaaggcgaatgagatcatcggttccgcctgaagtcttggcattcgactgccagtaaaactgtaaacaactataacttcttgtatagcttcatatcttcagaccttaagataactaccactgcttatttgtgaccactttgacattcgacgtcacgtggctgtatctcttcacagttttccttccgttttatttttgcttagtgccgtgacttcaaatatcgctacaagagttcagacggtcgcacacctcggcttacttactgtgcagatctggtcctgtcgatctcctcaaggtcacccgatctctgcgttggcagcgcgcgtcacctccaacttccaagtcgcccagaacccggccattccattctggatcatctctcgcaacacggctcgaggctcagtttcagtatggagaataggtcatttgacgaggcgggtccaacatcccaaggtatgtcaaagcaaaattctattattggctcctaaaagccatctcgccggaagcttttctcccaatcaattctacgagatctacttgggcggattcactggctctcgtattttcagcccccctgttgcatgtccatgcaccacatgttgcatccgccacaaagcctatcagttcccatgttattttctccgaaggctttgttggcgtgcagggtggccccggtctgccaatatgcctggatcggagtcggccgcccgcaaccctttgtgatcacacgctcatgatacttttgttcaataggtacagcgctgccatcctctttgataagtgatgagttgtcagcggtccggtcgcatggcgttgcatcccccgatgaaacgagtgctgctcgccagtcatcgacccagcggaagaaatgtcgctttttcaaaaccaaaaagggtaagtctacattctgagtttctgtctgtaaaggatatttgcctgttttttccctatgcaattatcagcgcgtcattgaatatggacttgagtgccacaaacaagatcctgtacgcaggatcacccaaaggggcacttataccgaggctatgaccagaattgcacgattgatctgtgccccaatcctttgcgcatgtattctcggtgcttgtcatttgataagagggtgatgttttgttcagattatatgctaacattgctcaaggatgccgaattggagcagcatgtccgtatttacatgatgtctcggccattgagaataagcaggcaccagccatttccccgggaaatgaaagccagacttcggcacaagccattgtcactggggtcgagaaactgagcattgcgaaccagtcgaagcaggcctctgccgcagctcctgtccagccccaaagaccggtttcgaaattggagcagtcagacccaagagagtttcagatcaaccaattgaggcggcgttaccgtccacaggaagtcaatgatactcaaggttctactttaacctttggcttggtaccttctgatccggacttcccgttcgagcttgaaagactccaatgtgtccttcatgtcccaagctcatacccgaaggggcggcccacgcttgcagtgaccaattctgaaatggaagcggcgtatcaagaaaatgtcgtcagaggtttcaatgatattgtcgattttacataccgcaccaatggccgaggaactcttttgggttggctgaacagtctggacaaaaagctcgaatcactgctaaccacactggagcgggggccgacactgaagtttttcgctaacgttggtgatgtatccacgactaaagaacctgccaaggccccggagaagactttaacccagccaggatcgtctcaagatcatggtagaacgccgagtggtgctgctaaaccaacaccacagccacgaactgtagtaagtagacacacagccgaagcaaaagctacagccgagaagagacgagcaaccgagacaaaacagctcgaggcgcgccttggaagactgccgatgtatcaaaaactgcaagatggcaggacatacgttattccactccagtcaactaaaaaggatcgcctgccacgaacacttcaagcgctcaagactgtgaaattgattgtgccacaactctacccactcgaacacagctcgatcaagttgcaaggagtcgaaggccccgaagtgaaggccacagaagtgggatttactcagtgggtagaacagacttcgcagctgagtctggtatctcaagtcaattatctggcaagcaatatccataagttcgctgaaacacccttaccagagcaggtgtccgcggaggatatgcctctgactgttgaagaagacgaggatgaggttgtggaagagcctacaaaggcacctgccgtgccctcaacccaagataatgaagacaagccacatcttgttgtcattccacggccacccgaatggtcggttcctaatcccaacagtggcgccgacgggacatcgggtgagtcgagtcacgaggaagacgagtattcagatgaagaggaagacgaagaaggtggtgcacccgttcccgcatcagtggacaacaacgcacccggacgaggcatcgcactttccttcccattcttagagctctacggaattgagcttctggaactcacgagcctcaatattacaatcaaatgtgaccgatgtaaggtggcggtcgacatcaagaacgtgccacaaattaccgatgagaagggccagatgccaaaaatggagtcgtgcaggaaatgtgctaataatatgagcgttggtgagtacaatcaacctcattctcctttctgtgatgggttgctgactttcgtgtgcagcattccggaggcagttgatgcattctcatgccaatcgtgctggctaccttgacttgggcgggtgtacgattggggacatgctccttaggttggttcttgcaacatcatcaaagtgctattttttaacccatctcgctatagcgacttcatcccaacttgctccgagtgctcgacgccccatccggcaccgggtatacctgcagttcgcggcgagagtgccatgggtacatgtcgcgagtgtcatcgcaaaatgggtaggttatgatatgcagtgtccgttgtttggctactaacatatccaactttagtgttcaagatcccggaggtaaaattccttctagtggggaatgcagcaggtaagtcccgatatatcgagcccacaggagacgctttttactcattgctgtatcatctagtcacttctcgtggagccctccctcccaagagaaaggttcgtataatctacagcgtgtatcatcatgataaaatctaacaattatctcagcctcaggaagtcctcggtattgtcgcaggacaagaacttccgcgtcgtggtcgttgccagcactacgccaagagtcaacgctggttcaggtatgtggtcccctatccatgagttggtagcactcgaaaaataggttatactgacccctgtacagattcagctgctgctcaaaggttttcccttgtgacaagtatggtttcctactaaatgcatctccatcttttttcaagtgcttattgatttacctagatgccacgatgcggaaaccgaccacccgaacgaacacgcaaatcgtatgatatgtggctactgctcccgcgagcaaatctacaggcctgagaactgcggtatttgcaaagcagtcttgattggaaaggcaggtagtgggttctgggagggcggaaaaggaacgagaaatcggactctaatgagtcggaaaggtatgtctctcatatcaaacttcctgcgagtgcactcatctaatggggctctagatccgaggaaattcaagcggattggagccaatgctcccacttcgagttcatcgaagcggaagtaaatgaatgaaaacgtgattaagactattgtatatctcaatatatcaagtacaatagtttatttcaatcttaaaaaaccctttcctaacctaagtagcgaaaacctaaacagagcattagtgtctcatcattaatgtcaaatctcatcctcacctgatcttcttgttactcactaattactcgcacaatcaaatccatcagaccaaaatgtccgcgatactgtactcgctagaagccgccacctgcgttgctatatgggtgatactattgataatgagcggcgctgctataggtctttgtcctgatccagatacacctgccccgctttcatcgctaagaggaatcccaagccaatacggtacagatatattcagagccaccgaatcataaaataaagaataagtcggtgcaaacacagaaaaaatgcctcgatgataaggaacgtttgcttgatgaatcaagggccatattcaagcggaaaacatacttgatagagcggcttcaacttcgggaagaccgaatggcaaagggcgacattggtgctgctggaccatatccaaatagtacggcaagacatctctatgagcttcagttcaagattcgacagatttggcgtgagcttgcggacttgctggatcgatattgcgactgaggttggacttggaggtcaacgggggattactggatgatcggagttgctattaagaatggggttcgagacagtggtaggagcaataagttacttctgattgctcggttgatctagagtagagtaggtatctgttcttttaagaatccagatttgcttcattcaaatcgcttgtttcgcctgttacttcccctaaagtatctcagctggaggagcaatatgacgctgatggcctccatcaagtacagcaaattggaaattcttttgcagccttttatacaacacatatggcaccatctctcctcgagctgcaagctaccaatcaccactgggaagccggagtgcacaaaagcggacatcccatatctcgacttgaattacgaaacatcggcagaccatgacatgcttcagaaatattatattaaagtgaaagttcccatttcgctaaatacaagatttatgcccccaaactgcaagaactcatagaaaaaatgcccgactatacgaattcttttgtcctcaaaccaagttaccgcggagttcctgctctcgttcgatggcctcaaataacgacttgaagttaccggctccgaagccttcgaagttgtgtcgctggataatctcaatgaacacagtgggccgatccatcatgtgctatttgtttagttagtataaatccacgaatacttgagtcgttagtttccacataccttagtgaatagctgcagcagatagccaccctcatcgaaatcaatcaaaatatccaagctgcggatggtctcgaagctttccttgagtactatgccagactgcttcaagcgggcctgcatatctgtgtaatatgtctcaggtaccttgatgaactcgacaccacgtgctttgaggttggtgatgtcacggataatatcgtcggtatgaagcgcaatatgctgtacaccggcaccgttgtagaagtcaacgtattcctcgatctgggattgctttttgccctttgctggctcgttgatgggcatcttgacgatctcgttgggcgaggccatgaccacactactcaaagctgagaattcactataattagaaggttagtcatggttcttggagatcagctaaaatatattataacactcacgtgcagatttcgttgtcgtcgacggaccagaaacggtggaagccaagggccttctcgtagctaaccagtggtattagtaattgaggcctaatcaaacaatctaggcgaaacttactattcacagatcttatccatctcattccagtcctgatttccaacacagtgatcgatacgcttgagatgaacaccaggcaagaactgcaaaatgggatcctcgttaccagtctcagcacggtagcctggcatgaagataccgcggtactcgctgcgctcaataagagtatgggtggtctgcccgtaagtctggatagtagcagtcttaacatggccactcttatcttcaagaaccttagggttagagacagccttggcaccattcttcacggcagcaaagaagacagcatcgacgttgtcaacctcaaaggcaacatcttttactgcatcaccgtgcttctcgaggtggtcatggatctcctttagctcggcttgttcttcggaattgaaacggtcaatttggtcaagggaccgcagaggggaggtcaggacgaaggtgatatcgccgttgcggatgacatgagagcagatattgcggcttccagtttcaaggcccttgtaggctatacgtttgaagcccatgcgggtgatgtagtagcttgcggcctgcttggcattgccaacgtaccagtggacatggtcgtaaccacgatagctggccactgaagatgcctcgtcgacaactgaggggggaggactattggaaatagctgaaggagccattttgctgaatctattatgtttgtatgatggtgatattgggggaaaacgtagaaagatggtagtacaagatgagaggcggggaattcgagttgaagttaaatattcggttcctttgatttcaaatagctggtcctccagtagccgcaagtcatctcggcagatatcttcttcagtccacttttgttactttacacttagacgccttgtcatagctcccggccgcacggctatttcaggaccctgaaatatccggagatacccgggcccgctgagatcatcgtcaatatccgcctggagatcgatttcttagattcacaattcttgaaagattttattttcttcttcaattattgtgcatagaaccgattgcagattgagtctcacaatagcccacaattcctcgcctcaacaccaaatcccaagatgacatctatcgcaactgctcgcccatcattgacatctaatgattccgctgtcctacaagctctatttgacgccgaatcctccccctcatcgggagtcaccattgatgcatcccttgcttcatggccatcatctctgaacatccccgaaacagacttggcatcgctcaagcagcgcgaaacagacatcatccgcaagctgcaatcaaacaaatcacctagtatagagacagtccagtcagcactaaacgacttcgacactctactcacccagcatccaacatatccctccgcatacacaaaccgagcacaaacactccgcctgctggtcgatctgatctacatcccagaagcgggtagtgatcaaagcactcacaccgaggtggccgatgctgccctctttgctcctaaaacctcccagctttgctcccgcatcttctctgacctaggccaagccataacctttgccacaccagcctccccggctgatgcggtctcaacaactcaggcacggctattggctgatgcacacacgcatcggggatacctgcttctcaaagcggcgcgcgtgaagaaggctggttctggtgatgataagacaggcccagagcgcctgcgtggtctttcggctgatcagcttgaagaaatggccagtcgggatttcttcgttgggggtcgctatggaaataaggttgcgcagcagctttctgtgcagacgaatccctatgctaagatgtgtggggctattgttaaagaagcgatgaggaaggagcttgaggagtgaagattatttagcctgaagaaataatttaatttgcgaagttggtatatgaaataatgaagcaataaggaaaacctattttgatagatttgattgaatgctggtatcttcttatgctacagaaataagaggaaatgtgcacattttctcttcgcagtgctcaggcccaaaccatagcttatgcctttttgttggggttcacaaagtgccgcttgagaggcttccagctgtgctcgttgtattctggctgcaccttctcgcaggtcttaagaccccactccgagacgccgaccatgtgagtactaattattgtcagcaaatatgaagtctcggaaatgatagcggaaatcgaacgaacctttcgaacataaaagccatacttccatcaccaaccttttgaggcttcagttcagcattgctagctccctcaaaagcacccgagtccggaccatgagcgctcatgacgttgtgcaaactagcaccagcaggcctgaaacctccgccgaccttcgcatcgtagtcaccggaaattagacccatgaactccgacatggtgttacggtgataccaaggtgggcggaaagtaccctctgcgacgagccagcgaggagggaagataacaaagtcagcaacggcggtaccaacatggtccgacggagctgtcagcacagtgaatatagaagggtcggggtggtcgaatgagatcgaaccgataacattgaatcggccgagatcgtatttgaaggggtagtagttgccgtgccaggcgacaatatcgaaaggggtgtggttctgtcgcgcggcgaagagcgtgttgttgaatttgctgtaaagcttgtactcgctttcctcttcatcgtcgaaagaggcaacgggggcttggaaatcgcgtgcgttggccaggcagttagatccaatggggcccaactctgggagctggtagtggccctggtataattcacagatgtatccccggacagggccgtctgggagcgtcactcggtatctgatgggagtgattagctgttgatcgtatagcggatatggaaagacacccacctaacaccgcgagggataacgcagatttcatttggtcgcaaaataatgcgaccgagctcagtctggatgtccagcacaccgtgctgaggcacgattaggaagtctccatccgcggagtaaaaagcttccttccccatgtccttgcccgcggcatacattaaaatacccagtccttgcttctgggttgggtctccggaccctgcaatcaggtgcagtccatgtacccagtcaaccttctcatctaaatcgaaggggttccatcgcagctggttagggatgtggtgaagcttatcggtctcagtcgtcatcctcgtatgatacgagtcggcatcctccgcggtgaagttctcatgagctgccgcgggtagaatccgatacacccatgtctgcttattctcatggcggggtgcagtgaatgccgttcccgagagcttctcggcgtagagtccatatggagctttctgcggggaattttgaccgattggtagagctccttcgatggcttccgtcctatttactcattaattttgggttcattcgttttcatccgtgttgactatgtgtatacatactcgtgatacgagtcgaagcccgtctggtatttatagggatcagggtggttgaacttagtgacaggcatattggcagtgatttttgatgttggatgatgcagaccttgtcttttcatatattccagatcaaccgagggtctcctttcaaaagaagcaattaatgtgaggtcacaccgttccgcggaaatctgagaattcccgcgattatcctcattccgcatcggttgaatgcggggggagcggaccagttccgccctaccttcgaggggctaaacatcatagtcaggtagttaaggcccgtcgctttctctttctttgaacttcttcacacattacatccatcatggcttcgtggtttcagattcccaagaactcgccgttctcgctcgccaacatcccgttcggcatcatctcaacacaatccacatcaaaggccgctgcgattgcaattggtgatcatgcattgaacttgagcacatttgcttcatctggaggcttctcacagcttccagctatcgagcagcacctagctgttttcagccaaccgacactgaatgacttcgctgcgcttgggcgccctgtgcaccgacaggtgcgcgagtatctacaagacgtattccgcgccgacacaaagttcccacaggtcctcaaggacaatgcctcccttcaacagtcagctctgctgcctttgtctaaggtcaccaaccatgttcctatgcaaattggcgactataccgacttctacgctggtctgaaccacgcctacaacattggtgtccttttccgtgggccggccaatgcactccagcctaactataagcacctgcccgttgcctaccacggccgtgcctcatcagtcgtggcttcaggaacacccctccaccgtccccagggtcagatcctggcgaaccccgccgcggaccccaaggtgcctactttctctccttgcaagaagctcgacatcgagctggaacttgcttgctttatcagcaagcccaatgatcttggcaagcccgtcccgattgatgaggccgaggatcacattttcggtctagttctcatgaacgactggtctgcccgtgacattcaggcctgggaatacgtccctctcggccccttcaatgcgaagaacttcggtaccaccatcaccccctgggtggttctgcttgatgcgctcgagcctttccgcgctgccggtttggagcctgcaaaccgggagtctctgctcccctacctgcgcgagaagcgcgccgagagtgcctacgagattcccctcgatgttgaggttaccaaccccggtggtcagcccactattatctctaagagcaacgctcgcaacctgctctattctttccctcagatggttgcccaccacactatcacaggctgcaacttgcgcaccggtgacttgttgggatcgggtactatctctggtaaagaggccaagactgagggtagtttcttggaacagactaacggcaagactcctcttaagctggcggatggctccgagcgtatgttccttgaggatggtgacactgttattctgcgcggtatggctggcacagaaggcaactatgtcggctttggcgactgtgttggcactatcttgcctgccatttccctgcagtaaatgacttatataaaaaatcgaattgaaattcgatgaccaatgtttgatgtttcatttctattgtttacttctacactatagaccttggaatggatggatgatcgcccgctatactcttgtcaaatgtcattaaacgtcagtaccagtacgacgatgggatattctagcccggactagctaacccactatttacaatgctctcagctattccttaatacgaaactcatcgggggtatcgccctgtgatctccaatgccccttcttaaccgcctcttccatctccaagttcttcacaatctcattcgtaaccgggaattgacccaggtcaacaccaaaccgctgagctccccaggcagcaggaatcaagcacaaatccgcaatggtaatggaatctccaacgctaaacttccccgccgatttcttaacaacagcttcgtaaaccctaaagccatcctccatcaaatcctttgcccaatcagcacgttcagcccccagctgtccaacccgcttgagaatcctcaagttcgtaacaggttgtatatcgcaggagataatgtccgccaacgtgcgcactgccgcgcgggtctctggatccgaggctggggggagcaaggcgggcccttgctctgggaaggcttcctcgaggtactcaagtgcagccagagattgcgtgattgtaattggcgcttttgagtcgtgctggattactagggctggcactgttcctgaggggttgatggccagatgggctggggaggattgctcgccctttaggagattcacgtagacgggcgtgaaaggaacttgcttcaagtacagggctatccggagcctggcagagcaggaggagcggaaataggtgtggagagtgactgtgtcggtcattgtggctgaagggttggtgatattcgaactatgagatattggagtagcgataaaggtacgaaaagagcctcgggagaaggccttatgtgcttataagccaagctactcaattttaactacctgggtgtcaagtcactttccccaagacgcggatcttgtgtgccgttaccttgtccaggtggactcccttgaacatgtagggtatttggtgcggaacatattccgtcattttgaagccgagctcaagcgctgtattttatacatttcggctatgcctccgggagatatccagggtacatcatacttataatgcacatggtacttctaaatcgtattagaaccccgcgggcttgcagctttgatattctgcatggcatatatctgcgatttcttcccattattggctcttgaccgtccagcacggggcaacatcaccaatcaacttcaggataaaggacaatatgattttatccataaagtctgtccaatagacaacacactatttgtctatgttgtacggagtagattaattatcacctctagttagtgtgaaaggtccgatcctaatatggacagctatgtgcgggccggccgacggatatcgccggctaataatcctggcccaaccgcatcactttgtctccttgcagttatccatagcatcaccaaatacccacagaatccacttcagcaccgagaccctggttaatccgcccaggaacggttgacgatggatggtgtcaggtcagcccgcccggacaagccgtatcaacgcacctacaaggcgtgtatcccttgccggcaacggaaggccaaatgcgacctaggaactgacccaggtggtcttccgatcggcccaccatgtgcgcgctgcagaagggaactaagggagtgtgtgttccccgagaaacgggcgtgggaaagatcccgcaaacgaggtgcgctagaattaaatgcttaccatatataaattggctggtttctgaatggtcaatctctagcgcgatcaccagagagctatgaaactgatgtatcaccccgacacgccacgcaacttacgaagtcgcccgatagttctatccccgtacaaggacggacacagaacctgcaccatacaagcgacgtagctaacttaacgcccgagacaaactttcagaagccgcctggctttcagtcgggatggccatatcatcggggtcaagcggggtctcatcatggctctctcgatcacccttccgtagggccttcaaggactgaccagtccccttctcatacatatgaaaataacacgcaccgggcgaattccaccctcgcgagctctatgatgcgcactgtcgttacaagtggaaatgatgcactcaatattctcttcgaggctgcaactgctcaagaagatcatagtcctgatactgggtccgaatcactagccgggcctccatcggcaggtccgagtacccaaggtcgaacacccggaaactacgattccgcgtttgagtcggtggcccgaataatacgtcccgtcaagctatcagacgcaacacaagacactctcaatgtctgggaggcttgtcggtttgtcaagatgggctggttcactgctagagaggctgttacttttgttgatctgttagttctctcgcaagctccatgtctctgcgaaataacagctaacccgatataggttctataagaatatgtcatgtttgtctccgattctaactgatttttacgccaaccatcgatatcattactggctgattagtcgggagccagtgctatgctccaccattctcatgatctcttctcgctaccacgtccttcctggagcagggggagagtcaagaaatttctttatccatcaccgcctatggtcacattgccagaaattgacgatgcggctaatattcgggcaagagaagtcaacaaaatccaaagtgcgaagtcttggtactgtggaggcacttctgttgatgtcagaatggcatcctcgcgccctgcattttccgcccgagacggatggctgggacgatgatttgatccccgaagcccccaggacccatgacaataacgattcaaatccagcacctggcaatcgcggggtggaagacataattgagccagcacgccgatctgaccaaatgtcctggatgttgcttgggtgtgcgctctccctcggacacgagctgggcatattcgagccagaaggaagcatcccaccagccaacgaaccggaatggaaagatcagatggcaattcgttggcagcgcgtgcaacgtctgctatacgtctacattaatcaattggcttggcggatcggatgcatgtcaccgattcctcaatcattaacccatgctatactgggcgggcggaagccgcaaggattgagtccgccgggcagcacatggttgacgttcatggattcgtggattgagcttaccaagctagcaaagtctgtcactgatatgttcttcccctctgccgcttttgcacgccagcaactgcacagcggccgatacgttggtcttcttgaacatttccgacctctcctcaaccagtggaaagacaagtacctgcagcctcaggtgcttgataaagcattctacaacgatctattcatcgaataccatttcgtccgcgtctacacccattcagtgggaatgcaagcagtagttgagcgtgctgtcgcagagaacgaccccaacaattttgacggagtgcgacccatgaccatcgactcaacagactacgaatacatccaagaggtgattgatggatgtggccagatcctgcaaaaagtcacccatttggccgaggcaggggcgctacggttctctccagttcgaattgttcttcgcataactagtgcttcgatattcctgatgaaagcgctcagtctgggcacacggcaggccaagctccaggaatcaattgaaatattagaaaagagcatcaaagcactcaagtcgaatgctttagatgatgtgcatctgagcacgcgatatgccgcgctgctagacatgcacgtatcgcgcttgcgacggaatctgctcgcatcgtcgaaagtcgcgaaaggtcgagacgctccgcgaagttcacccatggggccccctccttggccggaaactggtgaccggtcaaatcccataaacacccctgtattgcagggctcaccaccggatatgggatttatcccgtccttgaatgatattggtgcagataactggctttcgttgccattcgacccatcgatggcgccgtttgatatgacccatggatgtcaatttccgatgtatgaaggtggagcattagactttatctggaatttgccatcttgatagagtccgctctgtacacagagtattcaattagatagctttgtaaatagctctgtatggtcgcaatcacgcgatgttgataatgataccccagttcggacaatgttactccgctttatatttccccgcaccaaacacaaccaacgtcagaatttcaaccagcgtaattacccagcaagatgtcgaaaccagcgtcatttaaacctacccttatcatccacggcggcgccggaaatatccaacgctccaaactccccccagacctctacgccgcccaccacgcatcgctccaatcctatctccgctctacacacaccctcctcaaaaatggcagcacagctctggatgctgccgtccacgccgtctcgctcctcgaagacgaccctctcttcaactgcggccgcggcagcgtcttcacaacagccggcacaatcgaaatggaagcctcagtaatggtgacatccgtgcaccaatacgacgtaacacaaccaggcgcaatcaagcgcggcgcgggcgtgatgggtgtccgtaatgtgcgtcatccaatccgcctggcgcgcgaatcgcttctcagatcgggtgtcgccgctgatgggtctcctgtaaatgatggagggagtatgcattctcagctggttggtccctatgttgagactcttgctcgggattgggggctggacttttgtcccgatgagtggttctttacgcagaagcgatgggatgagcatatgaggggattgaagggggaggaggagcctgtttcgctgactcaggggactgtgggttgtgtctgtcttgatcagtgggggaatctggctgttgccactagtaccggtggtttgacgaacaagttacccgggagaattggcgatacgcctacattgggggctgggttctgggctgaggcttgggatgagctcgtctcaggtgttggtgaggcagtattggaagattcttcggtgggtggcttgctacgtgaagcgaggaattggctcggtgattgcatgccaccgttcttacgaaatcagactttacctatttattcgtctctctcgggtgatgatgcctctcagctggacttggggcctgagaaggcatgtcgtccctatcaatcatctgctcagtcctctcgtcgacgggccattgcgctttctgggactggaaatggagactcgttccttcgggttgctgctgcgcgtacggctgctgcaatgctacggttctcttcgcccggtagcttcccttctggccttgcagatactgtgacggctgtttctgggcctggtggtgaacttcaacgttccgctggttccaggtggaagaagactggcgagggcgaaggaggtattataggtatagaggcagagcttgcccctgtaaatagggcatcggatgccaaactacatcggggtaaggttgtatttgacttcaattgtggtggtatgtggcgtgcttgggtagaggaagatgcttctggcaacgacgtcgagaggattatggtcttccgagagcaatatcaatagaagagcttgagttcattggtactttatatgtcaagaatataccatctagatttgttccctactgttcctacgagtatatttgaaaggtacaaaaatgctatgcaataccaaaaggtcttttgtcaggaccacacctatttcctatgccaggaagtattccggtgtgaaagtatcggcggacatttttggctatacatgtcgaaccgggcgaataggtacagtgctatgacatatagcctcagtaaaagtaaaagtacaggaggaaaagagacgctcgaagcaatgtacttacacccgcagaatcttgttcgaggacaacggagccggagaacttggctgccattttgtacgcgccaaatatgagcagttagacattgacctagaattattcagggcgcatacttcctaagtggagtagctggatccaaggtattttcaatccatagaatagggtgggccgggctcccgctaataggtcctagaaatggtcagatagatatcgggagaaaaaattgaaaatacccaataccctcgtatctccatttcggtcgagttttctatccccagcaaggtattggaaaagaggcccagatgtcggccatccatctgctctggctcttcaagacttggtaatagttttgttgagcgacgcgagagtcttatcaagagtgtccctcgttctttcgacggtgttgccagctgcaaatgagcatttctcgggcccagcctgatagcagatttcaaagaattcctcgatgatcttatcggtgtccacaacattcgcggtccagtaaccagagtacatactctgcgaatcacatacgcttaacacgatgagggtacatagctgcaaaggtcgcccccaagaccgtaccgtaggaaaatccccagtactgcagaagctctgcgccttgtttccatcgggttgccttgtgaattgcctgcctctggacctcgggaagggtcaacttgctggcaataatggcattggccatgttttctcgccattctccaggtcgctcgataatcgcaacgatatctgtcactgttggtgtagtattcatgaatcgccccatctttgggccgtctttgcgtgtacatgtggcgcctaacgccatggctcttccccaggcttgttctgttgccacggtcgagctgcctaacagatcgagaaattcattgtctagagatcatcgctgacgagaatgtggatctgtaaagcactcgtatcgtggagtagtactgttaatgccacggagatcaaatccgataatgtcatagtacttgtcttctgctgtctagggagccttggaaacttcccgtaagtttatgtctttacatggtaatttacctaggaattggaacagaatcgtactcactttaacagataaagacgtagcttgagagtcaactattttctggaggtgtttcccttgtgtcaggatcatattgacgcccgattcacccggccctcctaaaattaattagcttaatatttgtaggaattctctgtcgaacttgcctgggttgaccagaatagctcctccatatctggggtctgttactgatactacagcagggagtttgattattgcaagagcaaccttctcttcgccattatttgtgctgttccaatccatcggtacctagagacgggcgcattggtagctatcgaagcacggagtatatgagagtttttccgacggaatgatctagtgataatgtgatgagcaataatttgttaatatgaagacgaagaagtcataccaatctccaagaagacactcggtatccatcgtccacgagaccgtctgaatgtggagcaaccgcccgataaaacatgcgagtaacgaaagtaaactaaaagaacagcccaggagaatcaatagccattttgtccgacttcgaggataaatgagatgttgtggtcggaaatcgttggatttttgtttccccatatttgcagactcccgtatgtaattgggactggttgaggttatttgaacccgtggaaccccgtggggcgatgttgcggctccacatgttttggcatataccacgtgaccaagcacctgactgctgcttcaggtatcaactcgggcttctagtcgtgatttaagatgcatatttgtactctcttgatatgtatgttagatataacagtccacataaatacagattcgggctaattatatacaaaagcactctgttagctcgccttgagcgatgtaaagacgaaaccactcagaataccagcgatatatactgcaagaatcacaaagctaacaagcacatcggattcagatctaccatccctccaaaggtgtaagcaaagcaagcaccccatctttaggggaaacagtggcgctttctcgaatctccaatttagcatcaggatacttgagctccatgtggaaccgaccgacgacagcagcaatcaagcaagccagctcggacttcgcaaagccctgcccaatgcaactccgtggcccatgcaggaaagtcaaaaaggcataattactgaccgcgccgccggtattagccttaccgggacccataaagcggtctgggttgaattcattcgcatctggtccccacagctcttccatccggttcaggatttgcggagcaatgatcaataccgtatccttgggaatgtgcgtgtcggcaagagttgtgtcacggactgccttgcgtatggttaacggaacagaggggtggaagcggagaacctcgttgcacactgcgtttaggtagggcaggttatcaaccgcggctgcagagattggagttgggtcgccgagggaaggaagattggcgcggatttcatctcgcagacgtgtttggacgttggggttcttgcagagtgcgtagacggcccactgtagcgctgtggcagttgtctcgtggcctgcacctaagaaggtcatggattggtggacaaggttttcttcgtcaaaggtgccgctacttagtgcgacggagataatgtcaatgccggtttcggctttggggtcttccatctttgccttcttctgtcggatcatctgacgtgcgacgttgcggatgatctcgccactctgcttgatatccttgttgcgtttcgtcggtaatgagtgggcccacgatggattaccgaatagcacacatgttacaaaaatgattttcataatgagcggtggcgaggacatgattttgcggtaggattggttgagggtgttctcaggatcacgaagagagtcgaaatcatggtccataccggcgacgccgatgatgtccagggttgctctactggcccagttactgatttggacagttttgtcgttattgccatcggcctttctgctccgaaggtcatcctcaatcatcttcaccatttctacactcttggcccagaagactgggtagaggttcttgatgtggcgataggcaaaggctggcataagattcttgcgttgcgtctagtacattgtaagtttgagtccatggaagtgggatttcgggggccagatttaccttgtgctcttcaccttcagcaagtagaattccatcacctgtgatacgccgcaagctctgccgaaccaactctggtttttcaaagtcgtaaactttcgtgacaagaagctcgcccaatgattttgggcttgtcaaaatcactctttcgacatttccgacaatatagtaccgcaagagatcttgattgggtctgcttttggcccactcccgtagctgcggaaatggggtctcaagcaagaaacttggagaattgccggtgagccaacttcgaccctagatagcattagacaaattgacaataccatatgaaaaagggctggcctaccgcaggtgagtaaatgtgtttcaatggagtgaagtagtcaggatataagacaagccgataaacaatcctgaacatagtaataagcccgaaaatgacagcgaccgtcacaaccctggaattgaagatagcatactccggtttgaagtagatcccggcggcgaggccaagatagagaatggggaggctatcgctgacgcgctccattgctagatttttcggaggacccgggataaacaaatattgtaacttgacggctcaaatcacatatatagagagtaatagatgatatcttactggatatccaacactgcctcggttttgattaggtgtccagcagccagtgaagagccccgtgtggggtgtagacgagatgacaaaatgcttggctctcgttggttccggtcagatctgaatcctacacggagtacagtcttatagatagcaacgaacgcgcgtagatgacctctgcacagctgaaatgagtttgattcgagaaattccaggagagatgacagagtatggctttgagatggttgcctggagtgggacatacgagaaacacgggaacagatagaacctaaacgaaaacgacagcaattactacttgggtatgttatagctcaaaaatagaaagagaaaccgatgatataccgactatacaaatatcatatgtaccggataatgcctggaacttgaaccctttccctttccgatttagtgcttacctcttaccgctttttgatcactgaggaaaacggagcacatctctgagtaacgtaattcccagccgagctgcgcaccctaaccaacccattgaattttgacggaaaaacggtggtaaggcgagtgtatttgtggcagaaaaatctcaataaattctctaactctctaaaactgacaatagtcctaaaacatgacaatctgatggacaacttagtaatcaaaacaaacaaaacaaaatgaaaggatatttttcgggcgaaaaaccttctgagttggtttttctgcagaaaaaccagtctggtcagtcacgtgacccaactgtatcagggataaaaaatgatagtatttatcctagattctgacataccccccagcttttaaagtgattataaatcagggctttaagagctgttataaataacaaaattttccttaatatctgcttttataactgattagataactaatcttagatattctaagtaattccctaaactgttcttgtttctagtagggtaaagcttttgttaggctattagtaggcatttctacagttagaatctaatctatattaacctatctagcgttaacttcctgttttaactagtatattaatatctatatagcggagctttatatatattaacactctttcctttattaatagattaatagtctagagtcaggggagacctaagtctgccattgctaaaaagactcgctgaggctgggtgaaaaatcggccctatttcttctagaaagttcactgctttcgtcacactacattttgaactataaggaatggcggaagttctatatcatctatccagaaaggaacaagagcgattggattaggaataaaagtaagagaagtaaacgccgtatccaccgttcaaagaggaaaaagggactgtttagccatagcaatttgcgcctccatgcgtaaatcatcaagtgagaatgaaaaaatatcaagtggtggacgtcccggtaaaagagcgtttccgaacaacattttccgtgtgactttaatgggtggttgaggagaggaaggtaccgggaaaatggcttcatcctgttctttgagtggattaccgttgttgtccagtcgccaaagttcaatcgtaccagcaacaccggctcgtctcttgaaccacttaatcaatatcacagcagtaatttcaccctggcctccgatcagtaatcttcgcatgtcactttcaagaaggggttttgattcgctatatccgatttcgaagcagagcgtgggaagattgagaccatggacgttcacatgtacatcaggttctttccgacaattagcgtagacgccccgtgtgagtgtgatcgtatccgcgacttgggctttcatcattctcttctcggctgtcgtcagaagcccggcttctatccacttgtctcgtgcgtcttggaaccagattagggcacaattatgtagcggtgtaggtattttgatcataaaggttccagtattaggatcaaaggactttcggagtgcccgtgattcgagttgttcaaatttctgccatagttgtgtaccgacatgtggctttagctgggtaatgacgagtagatcaggggtattgattcgttcgcgttggatgaggctttggatggttgaatagacacgcacagcagttgggatgttcgctgcagagacttggatggggcgtaaagacttgttaatttcatcgtgatcagcttcagggagatgggaagtgggggaaccaggttgttgaggcgatgaagttggacacgaaaagcacgacatggtgaagacaggtgggaaggaggcaacgaaaatcgtgaaacgtcgaggttgtagcttcgggaaggatcgttgagaagttgtaggtaactagaaggaaggagcgttggcaacattgacgtcatgcttatgtaaggtaccctaaggcgggagcttacagaactaaaacaagagactacgatgaggcaaaaagaagcgaaagaacactgaaagtaaacgctcttgatgctgctgaaactgaagaggagaaaacaagaatccaagaaaactggatttttgacgacttttgcgaggaagaatatacgtaaaaaaaggctttgccgctgttcatgtcgacagtggacagaaatgaggtcacaagaatatcaggggtcattgtggtaacgaacacatgcacgtgcgatgcaagagcttcttggattacatcagtacaccaatggcattccttatatctagtagcacaatgccttcccgtcatgacgaagcatcggtagatttaagcgaaataggaagatagccgtctagccaatctcagagatcattatggttacgaccacagtcaacacgtataaaataacagaattcccgagctacatcagcaaaccgatggcatttccttttggtctttcgctaaagatagtcgttggttcttcagtgtcgtgctccagtatacctgtatagagccttgagtcctcccgggaaacttttgaacaaaacgcttggtcacttctgaccaggctagtttctgttcttccctgagcttcaccagtagacgatcctcttccacagaccatgaaaggccttttctcgagggacgcgtatactcagaagtatccgttttgccgctcgtgcttgagttattaaatgtaggcgctacgtctttttcatgtttcgaaatgtagcttgacacagacgtgtcctttccgctcggcacgggagcgcaatgcgacaagacaatcttaaacagtcaggacaggaactgtagtctgtcatcggctgagagggcagagaattgagcacgaacagtggaaaatgaaacgtttttacggccgagcccttaagcgaatcgactagtctgatgcttggtatgaatttccacgacgactgcaactttgttgattctagaaggctgcctgccaggtttcaccgtcctcttcgagctctgttgtctatcattagaacaggcttccttatccaataatcgagatttactagctgatggcctatctggacggactctaacgcgaggcgcaggctctaccgcttaggtctcctttaatacccgggaagtgatactcatctaggattgccgggtcgattgatatatcgtctgaaagatctccaggctggataggactattaggagacccaacttgatagtactgaccagcagagaaagcgaggtccagctcgcctgattcaaagctggggagttggtacttagaatcatgataaatattatggaaaatcggtatgcgattaacgttcccagagcttagtagatcttgtatatatagaatttcttcgaagtcgaacgtctcaatgtctggattggtggatgacggggttttgtcataaaagcggcggcagctcaaataggaaagcccacccgccagagaaaatccggtacgtatagagacacatatataacccgggaacccatgtcgagctgtatatgacattcacatggtctggcattgattacgtcatcagatcggctggcacccaatgtccgtcaacatcattcacactcttaaggactgttaggactagctactagcatatcctgaaatggaggtttcgaactagagtgggggttcccaagatggctcatgcaattcagtagactaatcgctaaggttctaatcctctgtgcgcggcgtgtgtgtacccctggcgcttacttagcgagtacgtcgagccatacgggccagttgtgcaggtgaccctcggggtcgtaacaaggacataatggactcttcgccagatagcgaccctgtcgagacagagataattgaatctttcacacccgattttgatattgtggatccatggttttgactcagtcaacctcaccagaagactagccttcctccatacgcacgatcaataaaaatcattgtcgcgacacagcgtcttagtgataaatattaccagagttggcatctactcaaggacatggggtcaccggaagaaagtgccaggttaaagacatggaaagctttgaggattggaccttgatcctatcgaaaatattggacaatgtcgatgtgatgtcaatacacagatgcccgtcacatattcgaagttataagtcgcataccctgccaacctaacaaaggcgatattattataggacgaagaatgggaatatattattaaatcgaaactcaaaacatcaccaaaaagcaaattctcactcagacgtccttcgaccctatgattctatcaaattcaccaaccgtatgctgccaaaccttctgcgccatcccctccgcgcgaagtccagccaacaacttcacaaccttaggaccagcgtgctctccattccagtgaatagtgtaaacaccactcccaaccttcccatccgtcccactggcaacctcaacctcctccgacaagggcacaccagcggaattccccgcggcatccaagcagacacggggaggatatttagcactcgtcgcaaagaaaagatgtctctccccggactcccgaatcgggatgtaaaccaaaggcccgataaccatgagcacgacattcataagccaggtcagaaaagtattggactcgcgcccaatgcccgtcttgactgcgccagggtaatcgataataaatgacacttctggcgcttgctcggccagtgtttccaaaaccatatcagtcatggacaccacatgtccacgtagcttcagcattgacatcgtccttccttggaagtcagtcacgtcgatgggaccttcatggccgccggcgagaacgctgaccacgcgccgtaggcccgttgcttgtttgagattggggaggaggttgatgatgaatcgtgttcgagcgtagtatgcagctgcacccaagatgtggaggccttcggatgtatctgtttgcatattatgagcaataatgtctttttttatttttattttcttgtaagggatgtggggatgtcctgcctaccttctccggaacgaatagttccacagctgaggaagaggatgttgatactcttttctttgttttgaagctcgcgacagaccttgtcgacgttccgaatcaaactgacgtccgctttgatgaaggtaaattctccctccgggttcagctgtcggcattcggctgtgatgcgggctgcggcttcttgcgaccggccgatgaagtatgcgcggggcgatcgtgctgagcgggcgaactcttttaaggctgcttcgccgatgccgcttgttgcgcctacgaagactgccacgaggcctgctgggagtgtgtcggcgatgtgggcatttgaggactggacgtctggtagagagaccattttggatgctgtgaactgacacaggaaattctagcttctatcgattatggaggttaaacgagggtatgatccatgtatttatactccgtatgtagagatatttctcgtattgcgctgtgttctatattcggtacatctataggccgtctcggtcggaggacggacttagccacacgaggcggaggaatgaaatcccccgggaatttatccttatgagaataaagtttcgtttacttgtcgtattcaattaaaacgtgaagatataattaagagatttattatcagaatatacaggaatagttggtcgcttatttggcctagacatgtatttttttaggtacatcactcgcaacatattgcggaataggagcgactgaaaatcatttcaaaaaaaactcatagattattttggatcttaccatattcagataaagcccacttcaccatccattctgactcgagaatttacttggtggtaggacgatcctcgggtctgaataagagcatctgtcgtaacatgtcgaagagagcgtctctttcccttgcatcaaacgataggatccccttctctcgcctaggcttttcaacgctatcctcaaaccgatcgtcgcaagatcggaaatatatacggtttattggcttaccatcctcggtaaatttatgctgtcgcgcctcccaccttctccaccattcaggcggcaaaacaccaagagtatccacatgttcacaggtcatgtcgtcctctgtcgcgagaaattcttcaaataatggccgttgagcgatgatagaccatatggtacaggcaagagtccaaatgtccgatgaaaaagaaagaggcttatttggttcaaaacgagcctcggggggccggatacctcggagggtgcgagattcgtatttcagttcttttgagggcgaaaaggcttcaccaaagtctgtaagtaggactcgagcttctgcaagcgtggtttcctcacttgcttcacctagccatatgggcataatgccatgggatgggacaccaggaggcagcgatttgctatctagatggacaaccgggtccagctgcggtactccgtatttctcatataattgttcgagtgagagttggtcgaaactgggcgcaacttttagaagaatgttgccgaggtgaaggtctccatggacgattccttggccatgcacataatctataacgagaacgagttgtgcagccaatgaccgggctacatcaggctggaacacgcggatccacgaaccatctttcagcccggagaggctggccctcgccgtcgctgtaacgtagcaaacgtgattgccatttgggccgcgaatggtaaaactatctagaatcgaagggaccatcgcctttcctggattgttgactagagaacaatgaggacgagtgagagtgcataagatatccacctcctttgggttcgagtctgctatgaaaacttttaccgcaacgtatttattggattgttcatcacggccgagccacgtagtcgaataagacccatatcctagcttatgaaccactcgatatcgactgtgaaagtgttctccgattttcattgggtggtagccccctggtcgataattctctattctttcgactccctcgagaggctcgtagaggaaataggcggtggaatcatcatcagtctctattgacttgaatgcggtgagagtgaacgcgcagcgtggttgattttgacgcagcagtggcatgagcacctgccggcggataggagaatctcggtaacgtaaaccattcgggcgtaacaatagaatggacaatgacaacagtttactcatggtatatgtgtacaggttgagctgaaagaactttaaagaaggagatagaatgctgattaaatgtaacggaacagcattgatggttgggagaaagggggagcttgggctggggtgaccgcccgcgggtttttctcgatcttcggtatcagacatgccagtgtcaagtatattcgatggaatgcgaaagcagaagcaactggaatagattaggcagactgaattgattcaatgccttggcactgttgtataggaagtgcttgtccagtcttggcgttaacaagctcacagggtcaggtgatgttgcctaaaatacagtgagaatgagattcgagacagccctcgagtatatcagaagatccttctcaacggaagcgccctgagaagttaggattgcatcatccaactgtgtagcgcccggagacagagcttatgcacatggaccctcccctggcgcgtgctgatggccagtgagcagtcagaatagagtgctgaaggatccatcttcccgtctgtctcagggtgttgaagtgggccagtggcagaatgttgttgtccctccaagaatagacatatgcaaattaaaaccttgatggatgcatgcaaagatgttcccaatttagaacatccaaaacagaccgaacaaagagatgaatggacgaagagaaagctccctcagccttaaaaacacccgctcgtgcctgtcccgcgtccccacccctgccgaactcctcttctcccctcaatgtgtttcacttcttcttcccctttttcaatttccattccaacgtcactcatttcccagccaacttccttggaaagttactacactcattcaaccctatttctatcggtaatcgcgcattctttctccatataattgtggcccttttcttggtatatcggcggtcaatgaaagcctgtctattgtcgctttcaataccccaatgcgcgtttgaaacaccagcgcttcattgtgatcatatacacgtggcttgcagccctcgatacctgatatcgtgatcaacctctctccttgcattccgcaggtatgcgccactcgcgcggttaatatactatcattcccctcgttgcgcctgaattttggctctctctactctttacacctgcttcaaactcaattacgactttgcccggctggcccgaggaagtcgacctttgatcgtccgtgatccgccattctctacaatcctcagtgatcacttcgtgatcactccctggcaggaccaggtcaattcacacaatgctgtgcggtggagaccgtgagaagggggatgtggcgatggaggagaaatgggactatgtggtatgtccgccccaatgacagtgttgtatagataactcggcatactgataatgactcccttagaacttggatgacttcaaatctgagtcttgctggacccccttctcctattttttcatatggttgttcctatttatctcgattgcagtctacggtgttgatacattcactgcagtcaacttgctggctttctctcgatggtccggcagagttcaacccgccattcccttcaatatctcccggtggatcttcgccgcctgcatcattgcttctttcattcttttggcctacagatggatacatgcaatccgctccatccgctcgggtagtattactcgcagctttctggacccgttggctgtgcgtatccaaagtattcgcctgggcaagcgcggtcgtggatacaggagattccttgtcttcgctgaattaacgaaagacaggaaagcagcagaatatgttgctctgtatgcgtacttctctttccagtgtaagcatactaccattgactaactgatcctcgaatataactaacggggcttttagtctggatgaacacgatcttcgcagatggcccgcgtcaagttctcaatgccatcactctctattcggtcatgcaaatggacctcattcccgggggcaagaatgcagcccacgacgatggaacttcctcagttggtcaattcttcaacaacgtcaagattttggccgaggacaacaaccttcaagccgtggtcttgtttggtatgcttttcaccctggtcgtttgggtcctatcggttctgaagttgatatcggccatcgtactttatttaatcttcctcttccaccatatcccagcggaagatggttctctttcgaagtactgccgtcggaaggtcggtcaacgtctgaagcgtatcgtgcaccgcaagaacacaaaggccctggcgaagggactcaaattacagaatcgagcacccactcagccaatgctggccatggattcgaacccgaccctgccgtctttggccgaagataagcaccccacagtggcttcttcgttgtcgcgaagtaccactcagaccaccttgccgccttactcgcgatcggcttcgatagcgccgacggccaacccgacactgccgaatctggaattagatgccaaaccgacactaactcgaactggaacttcatcttcagcaatgtccgagtccgcttcactgacaagcaatgcggccggaatgggatacagtcctcttgatggccggaggccgacgcttcccccagtacctcccttgccctcaaacgttccatcacggatggccactcctcactcccgaggaactcctgcgccatatgagaatgatggtcgtaatagccccggtcctggatatcgcaacttgactgatagctctgattctcggtcatatcagagtcacactccagcgcctgattatgcttcggctgaaatggacccttccgattaccacgattatttcaaccgtgacgatgcgccggctcactacgatccctacgggcctccaaggggtacatccagggaagccgacggttatggaggaagatacgggactcctagtgaccagagaggcgcgcctcgcgcacagcaggattactacccacaggatccatattcgaacaggtcctacacaccggctagcactggtgggacgcctgctccctatcggtcctacacaccggcaagcactggtgggacgcctgctccctatcggtcctacacaccggccagcactggcgggacccctgctccctatcggtccaacaccccggcaagccatcgacccacacctcccccacaagccgcattggcacagcctccaccaaggacgttcactccggtgagttcggcaactcccgctcctcaaaatggtggctatgcagctttcaacccgtcaatggttcaccaaacatctcagcctcgctctaatgggcctcccggtccgggcagctttactcgagcaaacaccgcttcgccctcggccatgcatcgtgctcccccagggcacacattcactcgctcaaatacccatcaatattgatgaggttcaccctgtaggcctcatttgaacgccatgagactttcctatgatgaaaaccaggagctggctctcctgtggttgatgaccggatcactcgctaatactgatcacgaccagcgagcctctctagattctgtacatacccctattctcctgactgtgatatccttaaattcttattccccatgacatgaattgatctctttttgtttccgaattcactacagagaatgtatagataacatgtagcttcgaagtaccattggaatcttgatatttccttctattgcgcgattccatgactcaatatcaatcagaaacaggatgatttattatacacctatacataaattacctatacaatcaacacctccccacgatccacaacaaacagcacccaatcaccaaatcttcttagcgatcatctcataccgctgtacatgatcaacactaaactccccatccttactcttatccttttcctccttctccttcaaccgccgcaatccatccggatcatccgcatagatcaacttccgcttctcatccccaacctccacaacaccccacccaccaacgcgctgactaccctcaacatggaaatcgcgcgaacgaggtgccccactctcagtaccagactggttattcgaggactgtttgcgctcgctctcccgacccttcatcttcctataacgggagcgcgcaaaggcgagcaggaccatgcccagcagcaatttcaggatgagcaggacgataaacccagtcaataacaagatgccagtgaagatatggacggactgggctggggacgggatggcgttttcgaggagggtacggaagaacgcgctgacgtgggcggcggaggcggggatgagggttgctaaggtcaagggcggggccgacgggatcggagagggaacgtagtggttgtggattgatgctagggaggttgctcccattgctgttgaggaggggttttgggggagtagggcggctaggaacatttggtaggtttgcacggagacccggaagaagaggcaggagagagggatgactgggaggccgatgcggcgggttaggttctgttcgccgaaggcgttggtgtaatagtccttggctagcacgtcgaggaagcggccgtagatggctgggcggttgttgttgaatttgttgatataggcgtgcttgagccagtctactagcatctcggagcctagtacaactagaaatggacctaggacttgggctaaggtcgggatgaaagaattgacgctgtggaaggatgatagaattgaggatgggaagagggtaaatgcttggggcaggatggatgatgcagtgcgtggaggggtggatagtggtgtgctgttcgtgattgtggaggactggcccgggaagctagatcctagcccgaggttgccgatgaaattgaatgcacctgtctccacgatattacgcgaagctatgatagtaagcatcagccatagctggaaccgttccacaacgtccgcacaggtaagttggaagaggttctctttctcaaacttgcggaagacggtagatttaatctccacaaattggtttgatagaagtagcgtaatcaatgcgttggagtatgaattcactgccacattcaaggtcatgacctggtagaacagagacaatgcatgagatactgtgtaaaccagtgccactaggaacagccagaatggacgaatgatcttgcttcggccgtccggacgacgctcaagagcctccctcgagaagagacactcgaggacatcttgacctatggcagctaatagcctgtcactgacctccagcacattgtagataacatatagcttgatagcagcctgtccgcgaatccagtgatacattcgactcgcatcgaagtacatcaaaacacagcaggtagctatcatcagcaggcctgtcagaatgtccgctttgtcgtctggaaggagcgccgagggcatcgacttcttccgtcgatggtgatacttgcgggattcggaggttcggtgtttccttcttggtgtttccgactgtgactgtctggagtctctatctgctggtactgtgtctggtcctgcagacgagcccgaaggaagatgaggggtggcgtcagattcgctttcgggtcttccacgctgatggtcttccttcgcattatgatttctcctgcgccatactcgaccaatcccattcagcacaaatttccaaatgaaccgaatctcagctcccaagttcatcacccatgattcgcccaatatatagacagctttgataaaccgcagtggcattatcgtgaaagagtaaagccatgcatcgaggcaagcaagactcccgaagcaaagcacctgctcaagcataggtgcaagcataatgaaattcataagcctctcaatcttcactcgtgatgattcatatgggaagtcattggccgcatcacggtggatgtacagcggtgaaggtcgaccagaagcaagctcaagctgaagataggttggcagagaaactggcggcaaaggaatagatgatggcgagggtgagggcttgggcgattctacaatctgaggtgatgcaacaaggtgactcttcaaatcgcgttctaacgcgggtcggtcctgtttcgggcgcaacgcccatgtctgggttaggcggtcattacttggggtaaggggcagttgacgccgcgtagagccaggggtggacaatgttcgtgctggctgcggccgattgcggagggatgaattttgaatattccgcgggaaggcaggactcgccggtgtagaagtatctcctggcaacacttctttagtgggccgcaactttgttaaaacatcagcgggtgaaggcctttcgcttagtgactgaagcgcaacctctggtatctccggtcgtgcgagaggagcatttccatggacgttgtccgagacaactcgccttccagggtttctttctagtcccatggggcggtaaggtattgactctggcgaggacgtgagctcctggatcttctcaggagataatttcatgaccttgtctttatcctctgatagtcggtgagacagatcattagacaattcagccaatgactcggctaatgtcgccttgaccttggggccatcgtacacatcaactaccgacaactggccaatattatccctggtgttcggtgaatgttcgaccaggatgccgagtccatgcgcggattctaaatcggctattttatatgctccgtttgtaaggtcccgttccgaggttgtatcgtgtgtctgttgctcatttgagccatcgtctccattgattgggcgttcgtcggcctcgccgttggactgcaccacagtatctactcgactgcatttctcctcaacagtatagggcaccaattgctgttgagacttcgagttcccactggctccgttttgaacagtattttcagccatcttccgcttgtgacgaaacctcactggtatctgcaacaggactaattttgacgacccagcaacccgcgagaagccaacgtgttccttaaaatacccacaagcttgcagtatcacctcttataccatcagaaagtgcaggggtctccgactcgcatcgtctaaattggctcgtgacgagtgatcaagctatgttcgaaggcgaagaggcgtaaaaagagatagaatcgcaaaaatggcgtagtttgttgcattaacaattttgttcaaccagctggcacatcctgaaattaaaaaaaaaaaaaacgacgcactgtctgagctgtttgcttgttgatgtcggcgttgtctgggggaagataaggatggcaggttatctggcaggtcggtgagtcggaggttagcgccatcggtgctcggacataaaaaagtaaagtaaagtcacgtgcgcctggaatagggagttttttacccctggaagggactacaacacaactcaaaaatgtctctattctcactgccaacggagcttttgctccttctaacgcataatctgcaatatgcatccgagctcagcgcgatgtcgcaaacctgtcgccggtttcataccatattcgatcctgagctttactcacgatttgcgaatagctgtgaattcaacattctgcgccttgtggaaactggcaattcagacgctatacaaaagctaggtctgctggttacaaattgtttgattttctagaaacaccggtggattggtggcagccatgtgacacgttcgaccttgaccgtaacttggaatctaagtcttccatgaccatcgcagcacggaatggtcatctgaagattcttcagctttttgttgaaaatctgccttcaatcattacaaattctgctcgatcttggtatcttctgatgcacgcggccctacgtggtcagttacatgtagtcaagttcctaattggtcagggtgtcccagtgatccatgttgacaagtcagcgcgtactagctcgattgttgatgctgcagttttaaagggccatttgccggtggttaaatatataatcgaggagattaaattcgcggatcgatcacacaattcggcagatcctcttctttgccttgccacacacgctggtcatttggatatggtcaaatatctggtcaaatgcggtgcttcctttacttgccaacacttctacccttttcgtggctcggccttcgacattgccatggacgagggctgggcagacatagcatcattcttcctaggcaatgcaactctagaagatctagatatcataactacaagcggctggaaatggatgtcgaaaccttgtagccaggataaattcggacatatattctacccatctccatggaaaaagccatccattgcccatatgatattggaccgagtcgatctggagaaacaactgacaacaattactccagataacgaacaagaagtgcgaggacgacagtttcattatcccaatggacgtccacggttggaccacatacatccacgctcatcaattcaattgctcgtcgagcatggcgcagaaatcaatcaagtggacgcaaatggccgaaccgctctgtttttaactatagaaagaaacaacctcgtcttgacaaaggaacttctcagactgggagccaaccccctgctcaaaacgtcggcaaatgtcagcgctctcgagctggccatttcaaagtgccaaacaaagcacgtgaaggcatttttgaaggctattgagattcattctttcacatgtgacaactttagtagcctcaatcctgacgttctgccaccggagaagctgccgaacagagctcctacatgtgcaagcgctcaatttcatatttttgcgaccgattttctttcggtagaaggaatcattgcaagaaatggatggatggatcaacctcggggatcacgagttccagtatggtgtcggaaatcgccgcagaactgggaggagattttggaggagagctctgaggaaagttcagaggaggactcggatgaaagctcgggtgaaggctcggatgaagaatgggataattattcggtgagtttgcagaaggagggtaccgaggaagataactttgtaccaatttggtctgcaaccaaggatgatgacagtattagcgatcctcgctgggcgcgattcttcatcgcaaaggccatgacctaacattactggcgaatgatgtacctagtactagtttagattggaactgaaaggccacggaagacatttataaataagagatctgatttgttaactagatacgaatgagtatgctcaggtgctagactaccacctaagaagccgtcctttctgttccatttgactgtgcaaaccaggactagggccttcacaaattgcgacacaaaaggattggccagttctaaaacaagtggaagcatctaatcgtgaaggcctatcattccagattcgcatctcaatcatgtctttcatgtggtattccataactcaatgcatatatgctaactatcatcggatgtacgtcaagtgacagggcaaaacaatgtatggctcaatcccaaagcctctagatctaccagtagccagggaaaagccagtccagcttctccttagcctcgggagtccagttagtctgaggggtgctaacaccgaacttaataccaccagccaggtgcttagcctggactagctcggcgtgctcgtcgctggccagggcatcaaggacagcagtcacgaagcgacgagcgttttcggcgttagacttcatgttgcccattaccatctcgacagtcacgtcagcggtagcctcgtgccagcagtcataatccgtggacatgcaaatcatctggtaggcaatctcggcctcgcgggccagcttggcctcaggtagagcggacatgttgatgacactgccaccccatgagcggtacatcttgctctcggcacgggtggagaactggggtccctctgtacgatggaaaagacatggttagtaatgttttgtcgtaaggataagtcacagcttcacatacccatacaaatcagagtaccgcgatcgtgcaggacgacaccgtcaccctcaaggctgtgtccgcactcgcgcaccaccttggcaacaccctcatcaaatgggtcaccgaaggggacgtgggcaacaatgcccccctcgaagaaagtccacgggcgcacgcccttggtgcgatcaatgacctggtcggggatgacaaagtcgcggggcttgatttcctcctgcagactgccaacggcggagaaagcgatcacgctgcggacaccgatggagcgcagggctgcgatattagcgcgagcgggaacctcatgaggagcaatctgatggtgcaagccgtggcggctcaagaaggcgacagcgacaaccttgttgttgtgcttacactcgtggtgcagaatagtgatcggcgaggaagggacgccccagggggttgtgacgttcagcgaggccacttgagtgaagccaggcaattcgcgcagaccggtgccgccaatgacagcgatggggacgggccctgtcagattcaatatcgtcagctttctatcgtagtgggggtatgaggggtagaagtgagggaggcagaagcacacgtaccgtcatatgtagtagggagagaagccattcttcgagcgagttgtttcgcggactcaattcgacggaatggtttcgatatagaagagaatgaacgtgagcctaagatccagcgcatcttgcgccatcttcaaatttctgaggctgcggccaacctgcgtttctccgattggttgtttgctgacccacgtgctgtgggttcctgaggccgccacctaccttttcgggacatctataaaactttaatatacatttacatcgacagtccctacgcaagtctccgtacacggagatatatatttgatggcgtatgggttgtatgaaaacttttgcggtaaaattgtacactctacatgtctatcagggtcacagttgaccattgatcgagaacatcttcaaaattatattctatgcagtcaaatacatgttcaatttgggataataaatacaacctagatgacaagagtctggggtaatgcacttgaattaatttaagccggcagccactcgtagtggtgagggcccttgtgaaccggtccaggatcctcaccgggaataccaggcttgttgtagctgtgtgcaccgaagtagtccatctgcgcctccatgaactgggtcggcagtcccaatccaccctcatacttgagatattccagagtagctgagagagccggaatatattgatcaaacatggttccctccatgacaacttgcttgagactatggaagttctggtgcaactcatgtgcaacagtatccacaaacttggcgtttgtcagctcattttgggctgcaagcggcggctgcagtagatccgcaatgtaatcagacttgatgatacatcccgctcgccagatctgcagacagtcgcccaaattgaccttccagccttcgtctatcgaggcccgggaaatcagctccagcccctgacagaaagatgccaggaacgagcagtacacagcttgtcgtaggttctcgataatcacattgtggtcccgggttccctctatcggtttcggcatgggcatctccagcttcttcgcaacacgcgctcgctccacgcgatttccacttgagattcgcaggtactgggcagccgctaacgtcggacaagagacatgccgggcggcagactccataacacaccagtgtggagtaccttcagtaccatcgtcgtcctgaaccaccttgtcgaggacatcatcgagcacatatccatcatcccgactggctccctcgcctttgtagtctcctttgggggttctccgtgtgtgtaaaatcttggcgccgatgttaatcaggaagttgccccgcagctcgccagtctcattccatttatcgaagacatctccgattgtgccatgctccatgccgagtccctcgtgcatgtattgccatgtttcagcaagtacagaaagcattccaccctcgatgccattatgaaccatcttgatgtagtgtcctgatccaccgggacccatgcgcttcacgcaggcagtcccagttttgggatcatgggccgcatacgactccaagaacggcataacacgctcgatggctttggcatctccacctggcgagagactgggtcctcgtcgtgcagattgatatccacccgagacgcccattccaatccaggcgacaccgatgtcagcacactctttctggcgccgctcggtattccggtagttctcatttccaccgtccaggatgatatcaccctctttcaggtctggtttcaacaagcgaagtacttcatccgcggggtcaccgtgcgtgatagaaaacatgaatagtttgtggtcggacttgccctctaggctcttggagaattggttgatgtcatagaagccttgaactcggcctgttatagctttgtcctctttggcgtagcgcaccacttcgtcgacgttcttctttattacatcccagacagagacttggagcccgagctcagcgaagcgaagggtcatcatagagcccatgtttccagctccgacgacgccgatgcttttgatggtggacattgtgaattggtcttgattctgtcaggctagctaagtgatgcaaagttcaagtgggaagtatgcgggaaatatttacaagaaaatgtctgggacgatcatcgctcttaaacaagaagattgtggcggtcggatctgtgatccgagcatagtcaatatggaatcagacacgccacgaacaagatttgtgtagaagaggcaagtgaggcgaaattaattgttgtagtgtctatcaaagactcacattatggccaagctcgatctgggctggtatgatacaccgatgacgacataagctctaaacaagaacagcccagttcaacattacatcacgatggacacagaatgaaaaaggaataggcgaaaaagaaaaggatgaggcaaatatatacccaatgataccaagcatggcaatctcccattcaagctcttccctcatacgtccagtgaactatacgtcttcgcagatatcaacaagcctcaacaaaatcacgatccactatacaatcttgtttgacagattttagagggaaaagaaacgaaaaatgtcaattccctactcaagtctccaaaaaatccccctctcatacgcttcctgctcaatcggctgcggcccgaaggacacccttccgcgccgcctcgaagcaatcagtgaagcaggcttcagcgcaatcgagctatccttcccagacatcttagacttcggcgcgctaaccactggccatcacatcgggccagaaaattacactgcaattttgcctgtggccgtggaaatccgtaaactatgtgaagaacgtgggttgaaaattatgatgctgcagccattctcaaacttcgaaggttgggtcaagggctctacggatcgtgaggatgcatttgctagagccacaggttggatggatattatggatgccgtgggtacagatttgttgcaggtatgatatggatatatatatgttgagcacgagcaataagctaatgacatatccaggtcggagcaacagacacaccagaacccttaatcacaacagaacgcgatgtcatcgtcgctgacttgcgttctttatgtgatattctcgcaaaacgcaagttccgcctcgcctacgagaactggtgctggtcgacccacgcgcccgggtggaaggaagtctgggagatagtgaaagcgatagatcgcccaaattgcgggttatgtttggacacattccagactgcgggcagtgaatggggcgatccgactacagagtctggtctgattgaatcggtcccgcagtccgagctacggaagcggttcgatgcgagtatggatgagctcgcaaggtctgtgcctagcgagaaaatctatctgcttcagatctcggatgcgtataagttgtcaccgccgttggagggaaagattgttggtggcctgagggctaggggtcggtggagtcatgattataggcctatgccatatgacggcgggtatttgcctattgaggatgttgcgagggcggtgctcaaaacgggcttccggggttggttctcggtggagatatttgatagtgggccaaagggaactgggaaggtgtatgatatggggtcctttgcagcgaaggcaatgggtagcgtgcagaagtttttgaagaattgtgcgacggattgagaaaagcaaatttcccacaaaatggtcataatgatatggggttttaagaagtctggttggtacatttggcatattgactatttagacttgaaataaatacacattttgaggactccttggaaggtcgtggacacgattgaaagaaaacgccggggtagaatgcaagattgacgccaatgagatcataaagcatgcaatataccttggaggtcatggataggataccattatccattagttggcattgctggggtacgcaacggtatatgttggaacgtactcctccttaatggaacgcaagctgacgaaacgggacattagattagcacttccggccttatcattggtaccgctagcacgtgcaccaccgaagggctgctggccgacaacggcaccggtgctcttgcagttgatatagaagttgccagcagcgttgcggagagcctcatcggcgacctggatagccgcacgatcctgggcaaagatagagccggtcagagcgtaggtgctagtactatcaatcttgtcacaaatcttggtgaagtcggcttcggtggcgtcgttgtaggagtgaatgacaaggatgggaccgaaaagctcgcgcgaaagcagagggtggtctgggttggaggtgcggtagactgtaggctggatgtaccatcccttggaagagtcgtaggttccaccaacgagcagctcaagttcggggtcattcttggcctcctcaataacaccggacagcttgttgaatgaggcctcatggatgacgggaccgcagaagttggtgaactcagatggctcgccaacgtgaatcttctgcacctcagcgacaacctgctgggcaaagtcctcagcaatcgacgaggcgatgtagacacgggatgtggcgctgcacttctggccctggaactcgaaagcaccgcgcacagtctggaccgcggcgttgcggacatctgcagacttgtgtaccaagtggaagttcttaccaccggtctcacccacaatgcgagggtagctgcggtatttaccatccgccacgccctgtgagatcttaccgtacagcatgcggaagacatcagtgctcccggtaaagtgaagagcggcgaaatcgcggctttcaaggacagtgctagtcacttctgcggcatcaccaggaacgaactggatgacgtccttgggtagaccggcctcaagtagaatctggtgtacgagccagttggaggcaattgcggagggcgagggcttccagatcacgacgttacccatcagagcgggtgcaccagccaagttaccgccgattgctgtgaagttgaagggactgatcgcgtacacgaaaccctcgagaggacggtactcaagacggttccacacaccagcggagttgtgactaggctgttgcgcgtaaagctcttcggcatacttcacaccgaatcggaagaagtcgcagagctcagcggcggaatcaatctctgcttgccatgcattcttgccctgtccgtgcatagtcaaggccataatatcgtagcggtacttggtcgcaataagatcagcggccttgaggaaaatgctagctcgctcggcgaaaggagtttcagcccaggacttgcgagcggcgagagcagaatcaatggcggactgaacatcggccttcgacgcgttggaataagttgccacaggagcatgggttgcggggttagactgagtgaaggtttcatatcccttgagctgtgtgattgaatgttagagatcgatagttcggtagatttaatatgtcttgcgagttcttacctccttgcccgcaactaccagaggcacgttcaaaggggctttctgcttatagtttgccaaagcctcctcgagacccttgcgatctggagtaccaggaatatagtgtttcttaaggttcagaattagcgcaaatgatcaaacaatctcaattccagttccgagctcacattaggttcgttgttaatttggggcaccttgaaagtggcgtacgtgcccatggagcgtgtgctagagctcggaacgcggcatgcgaggcgcgaaatgggcgcgcgggtgcgcaaaatggaggacatcgtgatagtttgaaatgagacaatgagttaacttctttccaagcactattgaaaagggaagatttggagaagaagtagacgcggggaagaactatgatgaaaagggccggctactaccggtcagaagctcatagctaccacggtgggcctccggaggtgtccaggtgggactggctaaagaccatagccaatcatcggtggccggctgctgtcccgggtggatactaccgggccggcgtctatcagcgcggtccaccggttttgtgaaatcaatttgttgaccggccctgtcccccacatttcaagttcttattagtcaagagataataaccttgggaagattgagtcctcgggattccccgcaaacctagataagcttgatagcggcaagataaatatcggataatcaaattcatgggtacagtatacaaagttcacaggaaggtaacgtccgatcattcccttgactgatatactttaaaatctatatctctaccacatggtattatgcacggtaaaagcatcatctttattgtaattgtagatagaagcatcctaaaaataacagcagactaagcaaattctatgcaatccaccaccacactcgctctagccagttgcgtggctgcggctctacctcctcctcttcaagtcggtcgatctcatccttgccagtgaaaatgtcaagttctgataccttggtcatccatggcgtcttgtagtatattttgtggccaaagtacagcacgaagaaaatcgcgaagacaatgtaggaaacaaggaagtccgacgcagtgaaagagcctgggaagaataccgtatagccgttggtaatagccaggagtgaaataaagccaataacatagtaagcgccgtatggctggatgggggtaatgaagggcctggacgggagcagcccgtggaagtccaatgcgctgcgccaacgctaaaataatttgttagcaagttattccatgaaaaagacaggaaaaaaggctatttaacttaccaagtacgccactgccacgatgacccaagagatgaaacctccaattgtcgtgatgttggtaaaccaataaaagacggttgaacccgaagtagataggttcaagaaagacagcagaccgatcatccaagtgactatcacagcattgtacgggacaccattcttgttgcagcgaaggaagattttgggagcctggccctcacccgcgagcgagtaaagtgtgcgagacccagcaaagacccaagaattacccgaggaaaaggcagagataagaacaacagcattgataacgtggttcaatccagtgataccagcattctggatgccaataacgaatggactggcgccagcaccagaactgccgctcgcaacaccctgcaggaggttcttgtcattgtatgcgactatcacaccaatgaccaatgcgcccaagatataaaatgcaaataaacggtagataaaccgctttgccgccttggggatgttgcggcgtggcgaggcagcctcgccggcagcagtggtgatcagttccggggagaaaatgaaagagaatccgcacttgatcatagcggtccagaatgctagaaagcggcctgtgttgatgtttgggactaagtaaggttccacaaatgcgcctggtcgttgccagtaccggaaaccgagacgatcatggtttggaccaccgccgaagaaaagtacaatacccaggatgatcagaccgacgatcgcgatgatcttgagtgatgcgaaccagaattcggcttcgccataccaggccaccgcgacaatgtttagaagtagaatgactagagttcatgcgttagaggatatcaggtataccgcactgttgggcatgtacccaccaacgagaatgatcgcaatccatacaccaacgctgactggggactgccaatattcaatgaccatccctgacgcagtgacctctgatgctatcaacattgaaaatgaatacctacacagggcatttattagtatgacaaactcggaccttgaccgaagggttattaccagtagttgtatcctagtagtatttgaatcagcattgggcttgttaaaaattttcaaagtgtcttcacataccaacagcaaatccaagactaggttccgtaaaccgagtaatcaaatatggcacagaaacaccttgaacgggaagataggtggtcatttctccaagcatgttcatgataaagtatacaatacttgacatgacaatataacccatgagcaacggagctatcacatattagccccatatcaagtttatgtttcacacgctgattcttaccaggaccaactgtcgccagcgctgagccactgccaacaaaaagacccgtgcctatacaaccacctagagccaagaattgaatatggcgcgagctcaagcctcgcttagtatctgagttgtgaatgatctccccctgcatgtcttttgggtcgtcatatggggactcaggacggaccgccgcctcgagactcttaggtgagtctttcatgatgtgcgaaggcggagaaatagaaagattggccaatatacaacactctcgggtgagagaagaagaacagtaacacgacagaaaattctagagagtgcaaaagcctataaaacaacttatatatccgaggacaggcacaaatcttattatatagccccggagaacaaagctaggatagaaaaccttgtctaaaagaaaaaaaaaacaataaaacacccaggggtgaaaataagtttccaccgccaatcggtgattcaaagtccaactagttgtcaacaacgtgagatcgtatgtccaatgtccaaaagagacataaacatccgcgccctcgtggagtctgcgattgagtttttagaaatgattggcgcccacattgccttttagttctagccttatctttgcaggattctcactcatatcacgttactcttatcttgcccttgacacattgcgtttcaaaatatccttctaagtttctaacggtcttctagtattgccgagccaaaaccttctgctaaccaagtagtctgcgattggctgaatgtttattaaacatttgcctcccgtttgcccctggatcacgtggtgtgcgtctggggaagaatccggggtaaaaataggcggacctgtgcccatgtgactctagatacaattagaaatagaccatggagccctggaatgcatctacatgataggtaattatgggttgaagcagcatactaaaacattcttggaaacactaaaccaaaagtaaccggaagcaagatcacgcgcacagaaacaccggcccggtcaccttttgcttatcgcttatcagtgggatacgcaatatcaaaccgggccgagtactattcggcatgttcagttatgcgaaccgactcttggctgcagattgctagggagaagaggcgaatatcaaagcgtcattcaatatccctcgtatacaatgatttttctacccttgacctactctagtagttctccgtagcgttgaaatttcctagaagcctgaaatctggtatagttcaaaggaaacatgaatgatcgcaatgccatccatggatcgtactacatgaaaaatgtcagggcgtcccggccggttaagatgggcctactgaccgtaccggcctggcggttgccaccggctcttacctcttacccaatgagttccaccaacataatctccatatctaaaaggtcgccttcaaccgtagctgttctacttctttagtctttcgttctaagcacttcagagctactttcctctaatagctcacaatactacgtcctcactgctagctatgaaggctgtaccttccgtgcgtgtgcctctcaaggctgccgcccaaacaaccagactagtgagcggcaccagcaactctcgatcctcggtcgcctcagtttcagccaccaacgtatggcaaccacaaacaaaagctccgtctccgctaccacgcaaggcactgacagcgcccctggctaagctgccattgtcatctgtcctacgctcgttgctgattttgtctgtttcctcatcacctctccttctcaagccatgcatctatactctatctttgctggcccatccacgcactgcattttgggatgtctccaaaaacccactgctgaacatgcttgtcaagcaaaccatctataaacaatttaatgctggcgagaacaaaatcgaagtgcaagattcgatcaatcaaatcaaagctctcgggtgccgtggtgtactactgggatatgcccgagaggtccttgtcggagaaaactcggatgccgcgtacgacgtgaaggctgctctggctgagattcagacgtggatggatggcacattgcagacggttgatatggcccaggccggcgactttgtcgctttgaagtatgtgtgataggattcctgttcaatttacaacagccgctaactgaaattcccagattcactggaatgggtaatgacgcgcttcgcctgctgcagtcgcagactatgcccacagaggttatggactcctccatcctcaaggtctgcgatctcgcaatctctcgaggcgttcgcctgctggtcgacgctgaagagcaggccgtgcagcctggcattgaggcctggatcatgaagtatcaaaaatactgcaactcccagacccccggccgtgccatcttctatggaacttaccaagcctacctgcgctctacacctgccactctggcccgtcacctcgagactgctcgtgctgaaggatacacactcggcgtcaagctggttcgcggtgcctacatgaagactgaaccccgccatctcatctgggctgagaaggaggagaccgaccagtgctatgaccaagtcgtcgagtcccttctcactcgcaagtacaattccatgctcaaggctccctcgaaggataccccaaccgaactcccccccttgaatctcatcattgctacccacaaccgtgagtctgttcgcaaggctcatgctctgcgcatgcaacaggctacccgcggcgaggactacggtgttgatcttagctatgctcagctccaaggcatggctgacgaggttagctgtgaattgctcgaaggatttgagagtgccgagaacagtgtcggggctacccccatggatgcccccaacgtcttcaagttgttgacctggggctcggttcaagaatgcatgggtttcttgcttcgtcgcgccgtggagaacaccgaggccgttggccgtactaaggactcccagatcgcaatgatcgccgagttgaagcgtcgcattggcaatgttttcagcaccagcaagtgatattcgagtctttcctgatgtccactttcgaaggatatccagatcgttctgtctttacttcgcagcctacgggttgtttcgctccatttttgcttttgcatttttattcgcgaatagctgggtgcattctgaatggcgttgctactgttttataaggaccttagaagttcactctgatgatgatcaatgaaatcaatgtttcacaatttaaatgactgtattcttggattaatgttagtcaagataggaatcaaattaagaaatcagaccagagagataatctagagataatctaatagttcgaccggcatgattgaggtcgaatcatttggagtgtagtctccaccggaccggcccctcctgaggtcaccacccgatgggctgtcccatctattattctacctctactactcaccccaacgcctctgcttctttcaagtaaaacaaacccgagaaatttgggttttgcgcatttcacaaatatacaatcaaccttggaaacactcaaccaaaatgcatatcctctcggagccagacgtttccaaaatcttccgcggtctaacacaagaccaatgcaacggcttcatctcagcactcggcaatgctctaatcagcataaccaaagaatcaaagccctcaactccagaatccgctaaaaaaatccatcaacccctccgtacagtcttcaccacaagcgatggcaacacctgcatcttcatgccggtatcggacaccgcatccaccggcatcaaagtggtaaccgccagtcccaagggaatccaaggcgtaatcaacatcttcagcccggaaggccgcctccagggcctcctagccgcagcagaagtaacagccttccgcaccgcgctggcaacaatgaccctgttcgtgcgctgcacgaccatccgcaaggacaacgttcttgttctcggaagcggtcggcaggcggagtggcacgcgcgtcttgcgctgctgctgtacccggaccaggtgcggcgagtgacgtttgtaaatcgcggtgcgacgaggctggcggagatggagagggatgttgtctctgagctgcgccggactaatcccgctgttgtctttatcacgcttgctaaggagggtgtctccgactacgagcaacggctgggggaggaactcgctgctgccgatgttattttcagctgtacccctgctacagtcccgaatttcgggtataaggcgctgcaggccaaccccaagccgcgatttatctctcttattggctcgtacaagcctgatatgcatgagattgataccgagacgctgctttctgggggtggcaaggtttatgttgattctaagacggcttgtcttgaagaggctggggagttaatcactgcgggtcttggggaagagcagttgattgagatgggggatcttttgggggcgggcgggatcgtggaggatgtgattaatattcctgctggttgtaacgttgtctacaaatgtgttggtatgggactgatggatcttgttgttggaaagaaggtgcttgatgttggggctgagatggggcttgggactcatgttgatgggttctaatatcttttggtatctctatatttaagcaagagaaacactatcattgatcagaattatgattgaaaagctttggcctcacattgcattcactcctggacgctattgcatactgcaaggacaattcaccaagctactggtaagggtttgtggtcttaaaacttggtgtattaaggtcatcatacaactagttacaccaggcgaacatcctggacactcaaatcaacgcccatttccttgcaggcatcggacagccgtttgtgagcctcataaatcgcaggacggggaatatccccacttgggatttctcgaagtcgttcttcctctccacctatggcgaacaagtgttgaatgaaagtgccgtagatttcaatagtgacgaggctgggaaacatatgcttgagcctcactaagttcaccagctggttgatgatgttgccattgggagcttcgacgcaccattgcgtcacagagagccgctccagagatggtggtaagtgcttagccagtatcaagtgagagactggacatggtcaattatgttgtggtccaatttgggatatactctataccgttaatttctgagaatgtgtgcattgggagctgcaaatgcttcaatacatgaaacttattgaagcgaatgcatccatcagcactcatgttgtagtcggggggcaagggtgtgtagtcgaggcaaagggtgttgagcgagtgtgccttggaggaaatcaaattcataaatgactcgagacagtaaccggtagccacggggtgtgaaccgctgtcctcagagcagaagtacttgaaggacttcaagtttaggcaactgacaataaattcgcgaattccacaaaccgagtgactctggtgcagctcaacatgcgtgatagttgatggttccagtggtaacaggtgtacacatactccactcagcccatatcccttgatcgtgtgcatcgatgaggtttggaaaaaaggattgagacgagagatatcccatgatttgctccaggtttcaattctcggggtttcgcgtacgatatccgatgggaatttgaaaacgacctctcgcagggactgaaacgccggtgtcggcgttggattgaatgggactaggtgttggtaggctttgcgtagcatacaatcagtgaaactggtgctgcggtcaggccagacgcattcaaggtaggtgatatttggtaagaggcagatgacgagagcctgccaagcgatgggtttgtcgtccgttgggatattatacaaccattgtttcagactggaggttgatgattgaccaaactttttgactgactgcttgaagattccatcgaagctccaggttgtgactagggctgtatggtgttgaccacatgtccacattttgcccagcttgagacttttgacttccccagccatggaggggttgtgaagaagaaagtcaacgagtttttccacccgctgagcgcagcagcaaggatcaagttccatatgaataaatgcctgggggtaaagttctgtgtacatgcgtacattgcacctggcgaggttcagtcgatcttgctgcgctgatagatgatccatgatcacaagcagcacctcagtcgggagggtaaccagcgaagacatcttgaattgcgatgaaaggagagcaagcgagagagaaatagagaaagagatggagagacgaagaaaggtgaagcaggtcagataagcccgagcatcctagagagagaatgaaatgaaggaagaagtaggaggatgactgaaagggaaacacgtccagcaggagtcgggagctgtatggtcagtcgcgacatacgcccattatacctagttcttaccataacattgttccgagcctagatgggccatacttacgtccgacagataggtcagcctataaattcttaaagctggtaattgattcgtatgacatttacatgaaataagccatagatatagaacaaaataaagaaaaataaggcaaaggcataaaaattcccaaaacatcgtccaaagccataaataagagaccgatgagcggaggcaaaatgaattcggggcggggatgtgcctttatcgattagcttccctttctctcctcccatggccgtttttccaaatcctgtatattcctggactgaatctattacacttctctctgcattccaatctatccaccctcttctcttttccctagacgatgccctgatccgctgtcacggtaatggacgactcgaccccgacgcccacccagcaaaaacgtcctcgcgtcgccgaagagaaccgcaaacgagctgtccgagcgtatgctatggccctattgtaccaactcaatcgcgtcgtctaacacaatcggttttgcgcaggtgtgatggttgtcgccgggtgaaagagaaatgtgaaggaggtgtgccgtgccggagatgtctgcgatatcgccgccagtgcaattttactcacattgaccccaatgaaaaaacccggtcaacgtctagttcgtaggttggccgcataatcatatccttattgccatctcgaccgctaatggcgcaatatctgataccagacttttggaccgtgcagccgcccaaagtcgaaatgacatcgccgaggcagaacgggtgcgcctgatggaacgtctcctatcgcattatgtacccaatatcactttcgatattcagtctttgcgacaggctgcagaggatctgaaggagaaacaccgccattctgagtccgatgcgatttctacccgggaagatcccaatgagctggaggatcttgccattgatgaggaggattttaccatcaaggctatgccagataatacaacccgtatgttgggatctgggaccatatacaaggatttgttgattgacactatttctcagaatattccggggaattttcgtacttgaatttcacaatgaagatccggaagaagatcgatgaatggatgaagactgcagcacccgaggtaggtttacgtgaattgtcggtgagcaaatactcatgctaaactcaagcccgtaggcaacttccgaagttgagccttttgaagaacgatggagaagtacacaactccagtccgcgtcacctcaggtgtctgcctcaattacatgtctaccgccgcgctatgtcgccgattttcttgtccagatcttcttcaaatacgcacaaaccaataatttctatattgaagaagactggttagtcgagaaattgggtatctgctacaatgaccccgaaagtttatcatttgacgatgcaggcgccgtgtgctgtattcttatggtcctggctgtgggcacccaattcgcacatatggagtcacctacacccgtgaattgcttgcctccaggctctacggcaaatcaagaccatcacttctcggaagacgaagtcggactcacattctaccaatttgcttcgaggcttctaccagacatcatcgccaccgcttcggttcgaagtgtacaggcctgtcttcttattgggacgtacttgcttccgttggatacttcaggcttatgctatacatactttgggctggcactgaaactggctatacaaaacggaatgcatcggaggtatcacggcgaaggcctttctccacgaatgatcgaagtgcgcaatcgcgttttctggacagcttttactattgaaaagcgtataagcattctccacggcagaccatcatcgttgtcggaccccgacgttgatggtcccctgccggttgattttcctggattgatgccagtcaatcaggtctcaaaccatacaaacatggtaacacttattacattgactctgaaacttggggaggtttcaaatgaaattacctcattgcgaaaataccgcaaagggcaacagcaggactgtcttgaacgattactgagtctccggaaacatctcgttgattggtggtcaactctaccagaggaggttacctgtcgtgatctgaatcctgcagggccgcttttcaggtctaatgtccatctcaagctagactactgtctaactcgagtctttattgggcgccctttcctgttcagcaatatcaaaggcatctcccagaacccctcgcaaggcccgtcgtacaaggggtcttctagtctgtccggtctgtcaaagtatcgtgcgactcttgttacagactgcgtggaagcggctttggaaatcatcgatctgtgccgcttgctccgtgatgagaccggtctcgcgcgagcctcgtttaccgaatttagttcatgccgtgcagctttgctagtcatcttagctcagggcctgaccaaacgaactgaaagacttggggctgctctcgaacagggaatttccctgatcaagatcatgtctatgggtgttggctcagcccgttcggctgtcagtgtcatagaggcgctcgaacgtgccattcgtcgtctcgaagcatggagcgagacccagccggatatgagcagcggaggtaccgtcgagtctgcctatgaccggttcaaaaactgggagatgctttggaaagcagggcctatctcgccgtccacggtcgcatggcaacagcaggaagcttttgctccaagtgagcaaaacatcccacaaaacattcgctcccaagcctctacaatggcgggtcctgctactcttcttcatggcatgtccctgacaccttcgtctgcggccatgattggcatgggtagtgctgccccaacacccgttgcacatgatcagagcattccagaaggagaagactcactcaccgacactttctccctctctcatatgccacactttggcttcgatcacttcgtttccaattttccacaagagctgggcgagttcacagctatcccatgcttcgaaccagattcgcaggctcaatctaatgggttgcctcgtgctgaaatgaaggcgctaggtaacaggtctgacccccctcactggctgaatttcatgagggattcatgatcactttttttcctatcatgctttgttcacaagcagcgactcatctatacaacatgtttaggttgggtcttatgactttgattttataccatcttgcgactgttttcacggctatatattgtgcctgggtgatgcaattccgggaaattgtgcactgcttattctcaatgcaactattcatacattgcaatcaatcttttactttgtctaggtcggatgactttaggcttttgtgcacacagagatatcttaatatctgctcattggcttgtgatgatgcttcgagcattgattgatgaatatacataatgcgcataaccctaatcgaatgtaaccttctttcctgcgaaaacagctggtgcctgctccttggccttccgctttgcctcccaagagggatgcaatgggccctcatccttaggcggacctttaggcttaccactagaatgctgcccagagtgaggaccatcagggccatctctgttctgaggccgtccagaaccaccaccgaaaccaccacgtctggcccctctccctcctctcccacctctcccaccgtcagttgcaccgcgcttcgtatcccatccattatctctgccaccatacttcgcagccagctgctcctgcttgacatggtttgcactgacaccgtacttcttctcccacaaagcccgacgcgcctgctgacccatccggttcttacggacaggcttcgcaccggaattttcctcatcggtggcttcttccgaaccagaccagtaaccgccgttcattaaagatggtaggaatgtcgtggttttcactgctgcagcagagcccttcgttgcctttgctttcttaggtggcggggagtctccggcggagaatgagggtgagggagaacgggagatagaaccggagatatcgtctgcggcggggtcttcctcgtcgccagattccgagtcagcttcggagtctgagccaggtccaagtcgtgagttgaactgtgagaggtcctcgtctccggattcgtctgagccggagatgtccatgtcgtgagccgggcgggagacctgctcgccgcgcctaggttttgtcgtcactgcctctgattcagactcggatccgctttgttcctttcgcggcttctttgccagcacatcctctttgttgtcctcttttttcgccttgctagtcggcagctcgtcgactctcagtagtttccgaatgccggccatgattccaggcatttccttctgcaccggagtggatttgaacagtcgcgccaggatattcgcttcggcggtactctttggtccctcctgggagaccttcttgactgcctggaactccccgaatgtccgcgtctctgcaatccgtttcgtcctgataagttgtttgaacaggtatcgctccgatgtgacatggtaatcgagaccctatgagaacagatattagcaatcaagttcctaagcgagaccctccggagagccgtctgtccagtggaaaaaaaagccactgtaactaggtaccttcaaagtctcgatctcttcctttagtcgcgccaacgccttatcgtccttttgcgccttggctgtcttctctcgccgactgagcttttgtcgctcaaagccgcgcgatgtcttgagaccacgcattatcatcaatacaccattttcgaacatttgcgtcaaccgggttccgtgaatggacattttgcgggtgtcgctcgaccgcgcggggccgctgacttcatcgagcttgcgtttgggcatttctctctgtgctatgattgtatgagtattcggggtagtgaaatgagtgattcaaaaaattaatggctcgttgaacaaaaaaggaaggcagtttcgaggatggtggtgatcgtcggatgttggtgtagcttaatttttttttcttgggcggatcccggcgccaagacagacgcttgcaatgaccaaattgatatctcgttcggggtacttcgtactgtaaattggacaataaaaaaaaataaaaaaaccgaatatttattaccaactaccgagggctaattagcttataaatgagctggggcaacttgaccgctacaatacgttgcttgatatattgcttgggaagaccatcgattaacactgacggatatgtacatacaaacatggcaaagaaaataatacgcgaacagaacctttctatttcttttcttcctccttctcttccggcttgggggtcggaagcttgaactatagttgaataggttaggaccttgtctttcagcaaggaagataatgtgacttacggattcgggagtgcggttttcacccgcacccacgggctcccagctagtagagccgctttcaaagttacggaaggcctgggtgagctcaaggggctcaataacgatgcgcttcttctcttcgtcatagcgcagctcagtataaccggtcaaggggaagtccttgcgcagtgggtggccgtcgaagccgtaatcggtcatgatacggcgcaggtcaggatggccggtgaagaacacaccgaacaggtcgtatacttcacgctcgtaccacaaagcaccctcgaagagaccagtcacactgggcacgggagttgcctcatccgcgtaggtcttgacacggatacgggagttgtgacgaacgctaagcatgttgtagacgacctcaaatcgctgatcgcgggtcgggaagtcgacagccgtgatatcggagatctgggtgaactcggcggcagtgtggttcttgaggaagctaatcacgggaaggataccagcgggagcggtatacactgtgagctcatccttccacactgtgaactgctggacatatttgggcagacaagacatgacgtactgcccataggcgtgaaggctgtcggccatgggctggtacttgtcggtagggttgaccacgggggcgcgcagaggtcccggggctggcaaaacacagttcggttagctcaatttgtcctatctatcggctcgtccattgcacatacgcgggcgctgcgcctggcgcatgttctcaggttccgggcccggtgctgtcgaggccttgggggcccactgaagggaggcggaggaaaaggtgcgggcggccatggacctcgtggcggatgccacagagcgtccagaacccaggcgcatcaaagagcgtgcggaggccattgtgtagagggagcaatggcagatgcaacgtgaggaggggacgaaggcacgtaagtcggattgtgaaggtttagagtggtcgagcactttagtcacgtgttgggcacccgctaaactggatcgggcaatgccagcaaaatgaagccgcgcttcaatttccttccttcttctccatcaatcatctccaccatttcttttcccctctcttcttctcgctcctcctcaaacatctaattaccgttcgcctttctacactttacagggcagcgtatttcttttattttctcagtttttcatccaatttgatcaggtgtcggcgtttgagatctcgtgtccctctccggttatcaccgtattccccgcgatcatgtccagtctttcattgatcgattccgtcatcgacgacgacgatgagttttggtacgtctcgaagctcactcaacccgcgcgatctgtgtactgatcaccccacagccccctgtgcattgaagagttcgatctctccgataagaatttcaaaccgtgtccttgtggatatcaggtatgtccgtctgatcaaggattttcacgcgtctcagcagtacttgctttgttatggcagggacagatggctcgtctttgtttctctctagcagacctgactgacatgtgatttttttttttttagatttgccaattctgctacaacaacattaagacgcagaatgaagaaggccgatgccccaactgtcggcgcggatacgacgaaagtaccatccagtacaagattcccgacgttgaggagtgagttatccgatgctctgtgatatctgagccacatcccaactaacctgctgtgtttaggttcaaggcagatctcgcactgaaacatcgcaaagcagctgctgcgaaaaagaaggaagccgaaaagcgtgaaatcgaagcctccagccggaagaacttggccggtgtccgtgttgtccaaaagaacttggtctacgttatcggcctcaaccctacgatccgagacgaaaatcaactccttcaaacgcttcgtggacgggaatatttcggtcaatatggcgagattgaaaagatcgtggtcagcaaggctaagcccggtggtaaccccaaccagggaattggtgtttatgtgactttctcgcgcaaaattgatgctgcgatgtgcatcaacgccgtggacggttctgggaacggcgatcgggtgctcagggcgcaatacggaacaaccaaatattgctcatccttccttcgcaatgagcaatgcaataatcggaactgcactttcttgcacgagactggggaggacagcgacagctacagccgccaggacctctcatctatgaactccatatccactcaacgcccaaatctcccacctaccccctctcacgtgaggtccgctcaacccatcgcccatcctatgcgccggcaacctagcaaggatgagtcgatcagtagtcgcaccggcataccagatggcccggctctcccgtcaactgcaagttgggctaacaaagatgctgctattcaccgaaccagaaggactagtctcacgggtagccaagcctccaacaatagcccacggcccgcaagtgccaatgttgcgacactagtcgaagaaccgaaacgaccagagaagccatcgccgatttctcaagaagccccacaatcaatttctcaagtcgatccccgatctcccgccgcgccaccacgtccccgtcgggggactcaacctcccaagctgccatcaccgtttgacggcttgctcaaggatatgaactcggcggatttcaagttttccttcagcacggctgaactgagtgccgaagaggtcaagttgattaaggattacccatctttcatcgatccatatggcggggtcaagcgcagagcaatgcgagagaaagtcgaacaagagcgtcttagccgcgagcacgagttgcttcaatccgttgcagctgaagaggataaccgtgaagctggtagcctccagctaggtggtgagccagaagaaatcaatcccccgcgcagtcgccagacgcgcgagtctcatggggctatccagccgccctcgcagcaggacacggcggataactcaactgttggatccccagtttctgcgactagccatcaattccaaggcctgaacctcgctggacgaagcttaactcccttgcagcaacagcagttgatgttactcaagtccgccggtaatcaacaagctggcctggctgaccctctcggctctgccgctctggaccaagccgcccatgtccgccaaggccttgtccacaatcagatggcacagttcaatgcgctgcaggcagcacagaaccgacagtcttcccgattttccttcgccaatgaggccggttctaagaatattcctaacgcgcgcatgttgggccagatgcaatcttcttctcccaaccctctttctgctcctagccctcaacatagtcttgcagcaagtggcttctatgctagcggagtgcagggtcccccaccgggactgaagacggctggtacccctccgattagtggtggtggaatgttcgcccaaggacatggcttcacctctgggcttggtggtaatggaggaaagcaagatccaactccggagttaatgcgagagctactgcgtggacgaaatggtacgaatgttagtggtttacagggccaggaggcggctaagcgtgagttcatgttcccttttcttcaacagcacaataccccaccccctatgactcctgtcaatggccttctcagctccttctatgggcaccaagcgggcgtgatgcctgattccggtggcccacagaagcagaagaagaaggggaagaagcacagacacgctaacacttcctccggtggaggtggtgtagtagatcttgcggacccgagcattttgcaggcgaggatgcatcaagtcggcgcgaatgctactgctgggcaagcgttgtacgggagtcagggccaaggtgggtacaacccctccatggtgtacggtggtggcatcagtcggtggtgaatccccgcggtttcacttgttcccgtgactggcttcctgcattttcctgttcgctttttcgctatgacattctgcccttgatgggcctgctttatcctgatgacatgatatcaattccctttctttcctccccgtggaggaggtcttgcatttgttgtttctgttttattcgcggtcaggctggcagctctgatttatgcgatgggctggacggtcacctggcgtactagggctttcccttgtctccttcaattgctatctatttcttgcatgctttctctggctctttccaggtgtctttgcatttcatggacatactggcgtgtgttccgagctcctgtattcggcggctgtgtattccctttctacttttttgcatccggacttccattatacgatctgctgccctgctgcgtcttgaagaccgcaggtggtgtttattatggattagtgtacgttaagatctccctaccctgataccacaagccgaaaagggtcttattcgaaatcagtctcctcacagccgccgtttacatagacgctatgtcctgcaatgttcctggtccaggagatgcccatcatgtaattacctcgtgatcgtttttgtatcttcgcttaaatccgctgctgctgcttagtcgcccttactaaagggatttatttctatccctctcatctgcccagtcacattgccacattttactttcttggacattcgctaacccaatgctctagtgaatgaggacttccctcctcttggagatcaatccaaggatcgacgacctgttgacagctttgggtttttgaagtctcagttacctggcgagtcggccgctcgtgttgggactcctacactcccacctggactgcctttacctcacgctcatccctcgtcttctgtattccaggaccacagttcctctaaaccttcgtctcctgccccaatgctcccacctggcttgacgcccaacatttcgcgactcaacagcccatcgcagagtcgtatggacagtccctctcgtcttttgagtcctgaactcacagtgggtggacctttgacatcaagccgcgtgaaggacgcttctcaaatatctttcggatcacctgtacaaaagtccgccactaaggctcgtaaccaacgcaaaagccagttcaatattggatctgatttcaaagattcgcctgcaaagattgcataccagttgcaggagagttctgccactacgaaaggcaccccgctcgactttggcgccccactacccacgtccatcaagactgagcaggcacgacctcctagctctgtttccgtcatcgggtcgcggcccgacacgccgcaaaccatcgcatctcgcctatctgactcccctgcccctcgtcagcctcgtattctgcgtgtggtagaaaccccgaagacagaaactcctcctattctcaccgcaccatctgtgtccgcttctgttgttggtggaaccaggtcccgctctaggagacagagcatctcgtcaaccagcatccccggaactcctgctgatatgggttgggacgctgattactatccttccacttctgcttctcgtgcgaattctcctcctgcctcttctcgtatcggctccgctcccgttcgcgccatgaccaagagccaggttaagaaggaacggaaacaaaaggcaaaagaggctgaggctaagaaggtagaaaccgcgcttgtgaatgaggagcctgttcaagcacctatcatggggcgaaagcgcaagaccaagaaagcccccacggccgccccccccccccccccccccgccccccccccccccgcccccgggcnnnnnnnnnnnnnnnnnnnnnnnnnnnnnnnnnnnnnnnnnnnnnnnnnnnnnnnnnnnnnnnnnnnnnnnnnnnnnnnnnnnnnnnnnnnnnnnnnnnnnnnnnnnnnnnnnnnnnnnnnnnnnnnnnnnnnnnnnnnnnnnnnnnnnnnnnnnnnnnnnnnnnnnnnnnnnnnncccccggcccgccactgtcagcacagctgatgcacccgctgccagtggcccggaaaagtcgagctctctaaaaccagtgaacgttccttcagtcaaggctgaacccaaggtggatacagcaaagaaagtgaaagccaaagagaccaagcccgtcagagagcctaccccaccccctgtcgaagagcttcctgttcagaaggaagcccccgtagagccatggcgttcaaacaatacagttggacggttggtcaaggactccgaggcccttggaagggcaatcaaggatcttttcatggaacgaacgaagcctcttcacgagttgctcgctgagatgcataagtccggcgaacttgatctcaataagagctccctcttcaaccctagcaacctcagccagcgcaccgacatgaagtgcactgcggaggactacgattatctccagtgtcccaacgaattgactgaggaggatcggaaaactctacttcgtggagagcccgttcgaattggcgatgatttcctcaaaactcgatgccttatcacaccccgcggctgcgtcctacgccacctcgaaccagaagaggaggaacgatacctagagcttgagaagaacatgactggtgtctcagatgctttcatgattggggacgacgcaagcaatcccagcgggggcctggaagcactcttcgcgaacccggagaagttcaacatctgctgggtcgacgacatgcccactcgcctaggtgccacgtccccgtcatcttctcttgaggcggcggaatccgtgattccgcctaatgtcctctcggccatggaagcagacagcacccgcaaccatgactgggctgtcgccaactcggcagaatttctcaacaccacccctgctgccgtgcgctccttcgccgcagtcaccgcgcagcacatgctgggtaatccgggcatggttggcaccaaccccactctcgacgacgttgctggtttgaccaacgaggaactgaaggagctctctggtcgttctcaaaaggacctcgagctcacccggaaagaaatggattcgctcgacaagaagttcgcagctctgcttcgacgcaacaagaagcttcagcagcaggcattgaatcttgctgctgggccggaagtgtaatcatccgcactatcctggaccggagctctcagttccctttgcaatcgcagcttcctgggtggacttaaatctccttgcatgtacatctatctaagcctgaatgaatcattgtagaatacttgttacatctgtcgacgtgcgttctagtaatctaatttccaacccttccatgaaatatgcaccttctaggcctatcctcacctggctcgcaatgagacaacttgattctttaacgccaagtgaatatcggcacatatccgaagttgactcttaccagttttgtgtctgatatatataccctacctgcctgccatcatgatttcaaccaacaaattaaagacgaaacctaccccgtccactaagttatagtagttaaagtgagaaaacatatcgaattccaattatcatcggctaacatggctcagaacatcaatgtctacaggtcaataggggaatgcgtcaagggatcaatcaccgactccgccagggctggatctgtcaacctccacattcctctactccgtacattttaatcaagactagacatttaatgaaggctcgttcctccgaagggatccaacattagctgattcttggcatcacacgctccttgacgattcaggttcaaggtggttgtctagtcctgaaacatgtggctgatttccgttattcctaaatatgtcaagtctctcacttctttcggtctggtacaatagggattgaggctgatacttgacgcttctgtcgctatccgatccctttcttccccatgggagattattttctcgactttctcggctggcatgtataatgcgtaactcactgagtatactatttcccgccttgttagtctttatttcttcactgcgctcatttctacatcattggccctctctggtgctatattcatccgtttgtttgttcacgttcaaacactacgatgtttcaattactttctgtgatagctactctgtttacactagcctcaactgccatatcgaccggcctactagtaccactatacgcctggcccggaacagacaaatggaatacactctacgactcaattgcagcccatccatcaatcccattctacttgatcatcaacccgtccacgggtcctggtgacacagaatacccagaagacgtcttcataaccgccatcgccaagctaaacagctatcccaacacgaaaatactaggatacacctacacaaaccaaggaacgcgagacagctccgaagtcgaaaaggacatcgctatctacgctaaatgggccagctatgcagggcagaatatcactctctccgggaccttcttcgacgaggcagcgaacggcgaagatccgagcaagctcgcctatttcgagaacctctctcggaaatctaagagcggtaacttgaccaccgttatcttcaaccctggtgtcaagctcgtggcagatgttgccaagtggttcgcggcagcggacttcattgtggagtatgagaatacttatgctagttgggtggcttcggctcctgatgatcgcttctcgacgcctgataactatggaagggatgctgttatcttgaatcagacgcccgaagatgccaatattgataatgttgttcggttggcgaaggatatgggcctcggtgctatatatctggcttcggatgataattatatgaatctcaccactgtgactaaggttgcaggtgctgtcgcacaaaatcagattgttaggcgcagggggtaccgtcggtttcagagctgagtatataagatcatttttatgtcagagtgcatgtggtcgagtgctattttgggttgtttatatagaaaccacggaagattccataaaccaatgcaaccgggatacatcactttctgggaatcttcgaaatctatatggatatggctctcgtgttagaacgctctaacgccctgaggtttacatgtatattttgtagaagcaagtcatctcaatccagaccgttaatcccatctttatacggccgcaggtcatactcatcaggatatgtttccaagatgcgcttgagctccgtcatctgctccctctgctcttccgtaatctcctcataaacatcagcaaatgcctccctaagcgagggcttcttctcctgctccgccgcgccaaactccctaagtaccgccttgcgcatctgatctcgcgcctccttctcctgctcctcactccaaagcccctgattctcaagccacttccgtagccgaatgataggattatcacgacgtttccaatcctcaacctcgacgcgggcgcggtacgcaaagctgtcatcgctggtactatggtgcgagacacggtagctcatggcttcaattagcacaggccgtccgccctcgcttagggcaagtcggcgcgcttctttcatcgcttcgtttactgcgaagacgtcgtttccgtctacgcgaatcgtgtcgatgccgtaccccacgccgcggctggcgattccatcgccccggtattgctctagcgttggcgttgagattgcgtaaccgttgtttcggcatataaagacaaccgggcaagaccgtgtagcggcgatgtttagcgcggcgtggaagtctccttcgctggcggctccttcgccgaaatagcaggccacgatgcgtgggtcccggtttgggttctggaggtcttggagtttcagcgcataggctgcaccggcagcttggggaatttgtgtggctaatggggatgagattgtgtgctgttgggtataatgttaagaaaagtagattgatgtaaagaggtggtggtactcacaatgcggggatagttttgtccatagtgaactggcatattccgaccacggcctgtatcattgctattggcaaagagctggctcatgaagttctttagggtgaatccacgttgttggaatacaccggcttcgcgatattgtgcaaagaccacatcgtctggtgtcaacgccgcggcggatccaactgtgatcccttcttcgccggcggaaacctgcaggtagacggtcagatgagttattttctttatttaaatcttaagtaattgaacgtaccatgtagaaacttaagcggccctgccgttgtgcctcgaacatgaccacatccataatgcttactgcacgctaaaagttaggtacttgatagcgcatcaagcgtggggtaaccaaccagatagcatatttttgtaccatatcaagacctcctcattcgtaacatcaggtgccggtctcttcttatcaacctggcgaccgtctgagtccatcactcggtaggtagggatagcgggcagatccgaggctttgaggaaggccatctccgaggtgaacttgctgttcacggccccagggaatcgaacactaaacaaatcaacatctcgtcagcgtttctccaaaaaaagaaaaacgttgtcctcggagcgatcacctgtctgaccccggcggctgcgagatggagctactccacctccgtgcggggacgatgcgcgctgtagttatgggctggctgcggaggccaccccgggtcaggagctttagagacattttgctctctgatgctattaacattttagattcaatttgtttcaatggtaaaaagtgagagatcccaaggtctttgaatgttaaatctgggggatgcggagagcggttggcgtcggcatcttagcgtcactccgcggccaaccgagtatccggttgatgcggggaagataattctacaaccacattgagagtgaacaaaacatcattggaagatctcaattgattgtgtcctttgtattcttatttcttccctagcataaggcctcaaatctcacatctcacatggctccccagcggtggggctcaaatccctcgcgtatcatatcctacattgcgacagggatgagagagagtcaattcgttcctcctctacctattgatggtcgaataattcagagcggtggattgcgacgatgttggcagatgtatcatagatcacaaagttgagttacgtgactacctgttcttcagatccctacgtcaattattctacttcccggatgtcgtagtagccctggagtccaagacccatcttgtcgaggactatacgcttcagggcatcggtgatagtcgtatccctttctagaactgggcctgttggaagattccactatccatatgtggccgtgccggtggcacgcttcagatgtaggacggtaaattgcccgttctcttgtaccggaagtctgctacaccgacgcgccattgtttattttatccaggggtaagtctgagattctggcgccgatgcttgtattccatggttagatggacaagttggtatgagaggatagagacggcgctgattggaggaaagttgaagttacaccaagggcaataaatactgtttgctattttgtttgctattttgttctctgtttaccacaaaagttgtctccttcattgtctaagacttagatgagtataaagccaagcacagccgagtgtataaaatgagtcaaaactaccaagaagggggtaaattgaacatatctaaagacattcaaaaagatatctaactttttttggaaaaagcccattgaaaatatttcatgtaactattctctataaagtccacgggtgttcctaatgaggtcggatatgatgacatcggtgcctgtgtaccagcctttgaggcttcggctccactatcggatggagacgatgacatagttggaatcgctttcctaagaatcttcaactttgctttctgtcttcaattctttgtacaatcatgtccaaaaccgatcaattccgcgaggtattgaataccgacatcaggactcctattcccgaggagctcgtaaccaggatctcatccctgccgccatttatccctataccgggtgtctccaactttcgcgatctgagccatgataacaacaaagtacgtccgggattcgtgtatcgttcgggaaacctgtcaaacatcttcggttctgggaaatccatcatcgcaaccgaattgggaatcaccacaattttcgacctccggaatgaaggcgagcggcaaagagccccttcaccctctatcccaggagtcgagacgatatggctaccatacggagatcgaccggccactttgaatctccgcgattttgcgggcgaagacaagggcgcccaagggttcgtgaagatgtacttcgggatcctcgaagcggctgtcccatgtctcaccgagatattcaagcatatcagagataacccagacgacccgttcatcgtccattgctcaggtacgtgccacgtgtatcaccttgctctcatggctattttcgtatagttgcgtgcaaaatcccattcataatcgacaaatgctaaccataggtttccgtctatagccggtaaggaccgaacgggtgttttcgcctctcttgtcctcctcctaatcaatcgaccccatgaggatattatcaacgattatatcctcactcgagttgtaatggaaggcgccagggataacctcatggaggcattcgcggtaaacacagaaaccggtgaagccgacttcagccaattgagccccgaggcactgggtatgcttgaaatgtgtggtgctcgagccagctctatggaggctttcctggtatcatttgagaattcctataaaaatggtgtcgagggctatctcatggataaacttgggttctcacagagtgatctatcgacaatgcgtaagaacctgacctagcggatcaaccgcgagcatctgtaaatatataaacaagcatgtacagagtatttatatattactgcattggctatatttgaaattagaccaactccaaggtgctagctctgatttcatattcttcgtgtcaatatttcagcgccgagagctaatcgatcttctcctagatgggaagttgtcgagggctgtatcgacggcgccaacttgcaaatacggaattggtacatgcgcggcggataggaggctgcgcgaaggtcccgtctcaggagactcattccgcgtcttccgaatactagttatattgtagacagagcaatatgggatacaaagcatgaattaaattgagttgttgactgagagagggtagaaaagatcgtatccgccttaggcaggaaggtggctcaggatgatacgttaggatggtacttttgtgtaggtcacctgctcatttccagtccgatatcctgccataatcagtattcttctgtcagcttcttccctcctacttgtagtgttaactatggttgactttccttatccatacgacactgactaattcatatcaatatttgcgtgcattatgtctgtctctctaacttatactaccaagtttatcggcatctactagcattgtagatagccgtggcatcagtgaggaacttgtcaaacgccccgtcaccggtagccgggacgatcgacttaggaaggtcctcaccgtcggcattacggtcatcgacagtcttagccttcgtcttctcaacccacttcttggcagacttgaactcggcatctgctgtacaatgatcattgtcatcgatcgcctcgagcatagcaatcaagtgcttgcaagcagttgcccactgcttagcgacagtcgtccagggtgccacgtccgtggcaaaggccttcgtggccattttggggagaacatcggggatgctgatgatgagtgcgaggcgatctttcaacgcctcggttccgtcactggaaccggttctgcgaccggcccagaaagctgtaatgtccttggtaagcttgggcgcattgacctcaggactttgatatggccagttctggttgaggtctgtgaatgtgataagtgagttgtgaacggttgtgtcactccctgaaagctcccataggcttgcattcatagacttggtggcgttgtacgatggcgcgttccacgtatagtctccatagttggcgagtgcgatcatagaggcgtatggttggttcatcgggttcgaggtgaagccaaccagacgcttgtataattcggcggcacgctttgtgagcgggttgaggaataggcggtcacggttgttgtcgttgactgggaagttgtcccataggaaaaggttgtcggtgacgtagctcgagtgggctctcacgatactttcgactgtgatattgtcgctgaatattccttcgccagtccactgaacgcggatcttcttgttcagcttggtgccgaattctttcttgtaaggggtaggtgcactgccggcgtagtcggtcgggacggtctcgaggtcttcaagatcgtttggctcaatgtattgcgtctgtacacggttcagatagaatgcctgggcgtcggcaacccattcatcattctcggtttccggccacttcttcttgtccgcatcgcaatggaactcaagggcgatatcatcgagagggatgtagaagctgctgataccaaagtcacgcagctggttaaacttggtgacagtagcgttgaagtcctcgtcagatgagtaacatacgtctaggccgggcgatagagcataggtgaagtcgacatgattgatatttgcagtctggacaagttccttgagctgggtaagctcgtcgccgctgtaaagagtacgccatttggcgcggagaagtggatcatacttgggcgtgtagacataggtgttcattttatgctttccgtggaattcaaactggtcgagacgcgcctcatgggaccaggggacaccgtagaaaccctcgatcgagccacggatagacatgagcggccagtcgcgcaccttgacaccgggaatatggtcatcggcgagaagttgacgaagagtctgtgccgcatagaatgtgccgcgggtgtctacaccgtttattacaatgcttggctgttgctcatacttgccagatgcaagaacatagccgtcagcgtcgaggccattcgcggaatttccagcaagagccttggcagcagcgacagcgactccggcttccgcctctgtgccaacaaaaatctgtgtacccttactgctgggcttggaggcaagaacagcatcaccaccggcagcagccacaactcccttgaccgtagagatcgtagcggagtccttgaaattgtccgtcacgattgtgacattacccgtgagcgatacctttccgcccgtgaacgtgatttcttgcggagtgggccaaaccgcggggcctccatcatcatgtataacaaggtcgctgtggtcaattgatgcagcattgacaggcccaagcgcaaaagccagaagaaaagcccgaaggcaggtaatgcgatgtgaactgaacattgtgtggagaagtatcatgctcaagggcgtggtttataccaagaaaggtgatcacgacgtgtttattgatgacttgcaagattggaagttacgatgccacgatcgattacatcatggcgaggagagtgcagtatcggggtttgatttgatttgattatttatcaggtcgtatgcagccccgatgcatactaagcagcaatttagcagagggtatttcgggtatgccagaagataaaatatagggaatagtgtttcaggtgataatgttcgcaaggggcagtgctctacgatataagacagagagcgaacctgcgacgattcacaattcacctcctcccgctcgtaacctcggaacgtagcgcgtctatcgtaatattatagcgagataacctggcgtcgccgatcgttgattgggtggacacaagtacaaccttgtagatcgtcagatatcgataccccaagccacaattgttaaagaataatttagatatctcgccgaaatacgcttaagcccttaaaagcctaaagtctccatgggctataaccttaaaattgcgtggtaaacgagataaagtatgtgaattgaatatattccggtagagctgctagaattaggacttggtatgacagatggggatttcttgatgagaataatgggcattaacgacgtgagacttcaatgatctgatctatccagctcaaggcaatagctgtttggatattattccgctataccactgtttcgattcagtgatatatagtacgttttcctggtcgaggttgatatatgcaaagcgctgttattaatgaaggttactgcctcttccaacgaactagttatacttcggaagcataattttcttccaagaccatctggacctatccacctgcatcaagactaacctgctctgagccaaagggaaaccttccctttcagcctagatccgaataggtaaatgatatactatccccacatcactacggggtaagaacaagaaactagtaccggtgaaaacccactggagccatagactatcctatagacccggtcgaagctcggaccgaatgactgccgatgtaaatagacagctctggatttctcggcaagtgccattcgtactgctaaaatggctgaatggatatttactgcgttaaattcaaccctaaaaatgaaagctgggtcgtcaagctagtgatgctagtgtagtggatcgctttcatactagggacgaaccaaaacatacatcaacatcaatcctatcgtttggatctatgtttgttctgagatattcactgacgtgaaaaaataacaagggacatcattgcattcgtcaatatatgagtatgttatcattgtaagattgcgccaaaaaaaaccctaactggcatgtaaatgcatcccaaaaccattatgcagagagcttgattgagaataaagtttgtgccccttctttaccacttgttgtcaaaagctttgccgtcaatgtagttaatcagctcctttactgggggcagatgatcgcgaccagcgccaaacaacatgccctgacgcaaaactttgcggtagttcttgcccggagacaccttaccgagaacatattcttggcgagtctcgactcgagtggggacagggatagaacggccgacgacagcctccattccctgccaagcaaacgtaatggcctccttcgcgccaccagggataccagcctcgtcaagcatcataatgcgtgtgttggggtaattctcctggataaaggcggcgatgttggggttataggctccaccaccgcacatgaatatttcggcgatctcaaggcccttgggagcatagcgacggtaatggtccacgatggcctgggcggtaacacgggttatggtggcgacgacatcgtcaggcttgagccctttggcctcagccttagcgatgaattcataggcaagagtgtcacggaagacttctcgaccggttgtcttggggggttccaacgcaaagtagggatgtgtcaggaagtcatccacaagtccctggtcgacggcaccgcgggctcccatctcgccgtcctgatcgtattcgcgctcgccgttagtatagtggcgaactacggcatcgatgaacacgtttcctggaccggtgtcgaagtcgtagcaggcatcgacaccgccgtggctgtccgggagcacaaagcagacatttgcgatgccgccgatattctggcatgcacgcagctttgtcgggtggtgtagcaccagcgcgtcgaaaaaggcaatgaggggtgctccctgacgtccagctgcctgatcactcactcggaaatcggtgaccgaggtgatgcccgtgcgcgaggctaggaatgtgccttcagccatagtcaaagcgctgcgggtctcaccggcttctggcatggagagtagccagatggtttggccatgagatccgaggacgtcaattgatttgatgtccacattgtaatccttacagaactggtgcacggccgaggcaaaggtctcgcccagaatcacattgacctctgacagctcggaaggggatgtcttattatgcaggatcatgttcatcacccgcttcttgatcaccggctcaagtggaatttcaccatactgcgtcattggtcagcatgtcgtaccctgtgcagcattcacgtaggcagtggtacttgccttgagtagttcgaagtgcataggcgattccggggtctcctggcagaatcggcaaagggcgcaatcaatgccatcctagagctgatgagcgtggtgtttctcgagtgaacagacggccacccaccatcgaggttccgctattcagccccagaactgtgatgtctaaactatggctggaagtgccattgacagagttgatcaccatgttggattccaatttgcgaattcaaacgatcggaatttttttttaaaagaaacatcgtgaggatcaagacactatttaagacccggtccctaaccggaacccataatgaaccaaccggtagatggtggagacagaatattcgcgtcggcattctcaatctctctgatagatctaatattggttagcaacaagggcagaagggatgaccggcaaaacgcctattaggaaagaaaatgataaatggctacacgcttgtgggcttggcccccgcatgaacagctccatcgcgccccccggtcttaccaagcttggccttcagattcttcaccaaatgccgggggcgggtccaattgcaaggattactcgagatcgcgtattttttgcttttggcgatctggggaagtggcttaccatataacatggggtataccacactctggaagcgactttcgccacgtcagctgaatgtcgccatccagatattctccctgattctcaatcttcttcgagggttatgaccagggtgtgatgggtggtgttaacagctccccgagatatgtaacagaagttggcatcggtagacctgatgggactgtgaccaacaccactcaccaggggggcattgtcagcgtctattacctgggtgcgatcttcggttgcttcgctggcgggtggcttgcagatcgtgttggtcggatcaacggcctactcgctgggtcattatttgcgctgatcggtggcgcgctgcaggcgggcgctcagaattccaacttcatgctgtgtgctagggtggttacagggattgggaccgggggtgagaatggatccctgctagtcttgcctcggggctggaaggagctacgattttaatttgtcatttcacagccttgactgggattaccccggtgttggtgtctgagacctcttctgcgaaccaccgcggcggctttctgggctatgtgttcattgccaattgtgagtcgttgattcgcgatatccactgtgggggccattgctgacatgcatgaacttcaagatctaggtatatccatggcatattggatctccttcggcctcgctttcgtcgataacggttactcggacgtacgatggcgcttcctcctcgcctttcagtgtttcccggcactcatactagtttcctttatcaaaatgttaccggatagccctcgctatctggcctcggtggggcggaatgatgaggctcgagacctcttgaatcgtattcgcaaagatcgggcatcgcaggaagatatcgaccgagaataccttgagattatagtgaccgcacagggaagcaagcgcagctcgcccactgaatttggaatgatcctaattggaaaaagtgaaaaaccagggctaaatcttggtcgacgagcttggttgtgtgtttggcttcagattatggcgtcctggacgggtattacggtgagctacggcgctcacaatcggtcccttggacaattattggggtactaatagtaattgtaggctgtgactgcctattccccgacactgcttgctcaagcaggctatagtgatataaagcaaaacggtcttgctggaggaatcaacacaattggaattataggtaccattatcagtgctcaaataatcgatcgattaggccgacgggtgtgtctgatgggcggagcagctattttatctgcagtcaacttaattgtgattatttcttctgccgctcgaagtgctttctcctgacaattttataggctggagctgtttatgaaggttccctgcataatcctgaaaaagcatctcaatttgcgcctggtgctgtgaccatgctctttttgttcaatttggggtaagtctgaaatgcgacacttcttgtcatatgtactaaagtgtaaccagttatgctgctacctggggtacggtcgctttcttgattcccactgagatattccccagtgatctacgcgcccaaggcaatggctttggtattacagggtgggcaattggggttggtatgaccactttagtcaacccgatcatgtttaatgtcatgactgtaagcttccccgacttcacacttgaattgaaatactgacgaccgcttagagccgtacatactttttgtttgctggccttaacctcatctggatcccgatcgtctacctatgtaggtttttgatctcgtattcatccacttttagttctgagatctaacatgattttcttcgcagtctaccctgaaactcgcgaccgctctctcgagtccatcgacgctcttttttcgacgtccagtccattctactggaagatggaacaagcctataaactccatggcgatgtcctcgccgaacacggagtaaatatgagtgaggtctctcagtggcggcaagacacaaactgaacttgcgactgtcaatttacgttataccatatagagccttgatcgtgtcacctacgcttgcacatgtataacatcatgtacccgatgttgttaccccgcacttaatgtattatatagaggttgtattcacacctttctatttgtttttcatttctttctcacttattactggtaggtcatgacttttatataaaccacatttagtcgaaatctatatatacatgccgtcttggtaaacagtatatacatgatattctccaatttctatgatctgcagcattataaattagtataattacatcttctcgcgatgattgccgaaacatccaccgcattcgatcccggcatcaacctgaaatgacacgctgctgagtcagcttttgtggcttgtaactccaatgccgactttgatcctcttcatttctaggattcaattgcgcatctatgtcatcggagaaatttactgcttcagcttgatcgcaatttttttttgcctttttcccattctgcacaggcctaccccacgatttagtacacgcgacccgtgtctctgtgcagaccccgaaacccgtttctcgaccgaagctcccgaggtcggggcccacgaattgtcacccgcttccttgcgcctgagcccaattcccgaggttggaatgaactaatgaattgaatgtcgcaaaaaccccgaaagcttcaacgcgtctccaaagcctgtaagatccccacgttgaattgtatactttcctcgcgcttggcggcaatatccccccccgaactgtactagaaagcttggagctcatgttgcatccataggcgacttctgcaacagacgcagcattaaatgcggcaggagtgcagacccgctaggcagatgtcagaattgtgcggattttgacgtcccgtgcacctttgatcgccccgcgaagcgccggggcgtcaaggctggcaccagggcttctatgcgagagactccgttggtagaaacgcctgcccccgagaatgtcctccctgtaccgcctacagggcggatgtcaaactcctctgtgtctaggagctacagcgagtccgcccaccgcccgtcattgactggggacccatggtctaccttcaatgttggtggcgtggcaacggaagtgtatgatgatgatagcgcattgcgaaactcatggaatgcatttgccattgccagtgatcgtcaaatccgaaatctcgtgcaggtatacttcgagattgtgtatccaatgtacgaatcgaccttactgccctttcccttttctatggctgataaattcgcagattcccgcttttccacaagcaatcttttattgaaagagttaataaccaagagcacctccgaaatccggggttgtttgcctctacaatggctgtctgtgcgttagtttcgggacgcgcccgagacggcgcattgttcactaatagatggcatcgcgaagaacttgccgaacctccatctgaggcattttatgctgcagcgaaagattctattccccgagaccttgcagcggcaagaggcattaactatatgcgtgcatgcgccattctcgcaattgccagcattcaaaatggccagatcaagaatatgcaaaagttttccggcatgtaccatacacttaccagtatggagggccttcatgatgagaagctttggccgaaaaacttgagtcctatcgaaatcgaggagcggcgaagactagtatgcattcctttatcttatggttacggttcccgctaacttaatgctatgaagttctggtctatctacacgttggatatttattctaccatcgtatggggaggcgtgattcgatatcgcgaagcgcattctctggtaagatatccgagtgaggttgacgatgagcttatcacactacacggctacgggatgcctcccgtgtctccggactcgggcgatgtgaccgttgtatcacggcagcctgtagcatggcttcggggctggaactttacgacagacctatatcgaattctagaatacgtcgtcgacggcaatcggcgtcgtttctcgtcagccaacggaacctcacaggtgtggtctctgttcactccggcatccatgtcagaaccagcagtcatggagagggtactatccatgtacgccgcactaccgtcgcaatttaaagaaacaccacccactacaggcgacatggccaaggacctgttcgggttccaatctgccaacatccaggcaacactgcagctcctccggatggtgcttttgtcagcggaagagcttggcgtagaccgcaaatgtgacgtggccggggaacttctcagtgtcttcagcaacgttcccgtggagtatttgaaagccatcagctcccctttagtatgttcatcattgcttttccagcccccatttgactaaccgctcccagctccatcatcttggcggaatcggctatatcctcggttctgtaatggaaggaagtttatcagaagcatcctatcaacgcgtccgcacgttgttgtaagtttttttacacatcccaggccaattgcccaaattaataagctcttacagactcgaaatggctgacctcctcggtcgcctcgagacaggtctccagcgtgccgccggcgccagccaacgccttcgatcgcaagtagacagaatcgacggctacatgcgcacctcccggctagtcaatctcacattgcaacacccacaccctcaacataacgcaatcccgatcgataataaacgcgagatgcctttcccacccacaacgtacattcctcccagtggcccagtcccggcagtcggcccaccgacgggaataggtgggcagatgatgcagttccagctaccgccggagttgttgtcggattggccgtggccaatggatggggctcattcggatgggttccttccgctggcgtttgaataatttattcggttgttgctgggtgcatttgtgcgagttggaggccacatgtttgatgattgcatagaatagaaggagtgtaattaatcgtctgttttatatttatactagcggtaatcgagcagaactcacgaattgtggtgttcgttaccctttcgtcctatacttgctttaatcgtccattttgtctctttcatatgttcgttctcaggttcaattatcgatctaaggtgcttctgcgccctttgaggtattaactacacaggtccgactttcggacgattacatgactcttggcctcttaagacacatatagtagtactaagcaatcttttaacagataaacctcattatcaaaagtctatttagattgagtggagggcgtccattttgtggagaatgctaattgagaaagtttgatgtacacagtttctcttacataccacagcaatcttgactcgaagtatatacggagtacgtaattccattatgagaaatatataaaaaagtactgccgatcactggccttgacctgtaggaacaccagcatcatgtacaacatagtggtcaagcccccgctagctcaaaatgcgggggtatacttatggcttcggccctcccaaggtaagcgggaatatcataattcgtacttggccaaaggtcagtggaaccgacagagagtttgttgatcttggccatggcccgatcggacattttgaactctttcagcctagtctccagtagtccaccccacaaaggcgtgttgaggcattcatattaacttctcttatcaaaaagtcttagttggtcattgagctatggcctctggacaattcccatcgaataacctgataagcttatcacttggcagatcttcaaggtttagcatcgccttctcctcccccttttgggataaccccgaagacattcgctgatttgaagttgatatcttgatacatctcttatcagcggtgtctggagtcggcccacggtcttggcccacgttcttggcggtgttagagatgatcaacatcgatgccgtctatctatcaacgtcgttggtgccaatcctgaccccaaggtcagtgcgcatataaagagtcatgtcccgcgcctctggacttggagtacattccaggctcaagtagcattccgccatggagaagaaagtctttacaaatgtttccgccgaggatgctagcacaggcgctgttttaccctaccgggagacaaagcgcggtctatcatcccgacatgtgcaactaatggccattggaggctcaatcggtactgggctgttcgtcggtatcgggtcctacctgcgggatgccggcccgctgtcactgtttctggggtatcttgtttgggggtgcctcttcatcttgcctgtcaatctgtgtgttggggaaatggccgcataccttcccattcgtgggtcgatctttgagctcgctgcccggtttatcgacccggcatttggatttgctatgtaagtcttttcgcgcctgaaccttgctgggctctacgctacagacgctaacccttctaggggctgggtatatttctacggtggtgtaatgctcgtctgtacggagtattctgcagtctcaacaatcatgcaatactggaacacaagcgtcaaccctgccgtctgggtagccatggcaatggttgtttgcacgatgctcaatcttgtctcggtcaaatggtacggcgagagcgagttcatcctagcgtcgaccaagatccttctcctcatcggactcgtcctcctcaccttcatcacaatggttggcggaaaccccaggcacgatgtctatggcttccggaattggaccgatggcgtcatgttcgagtactataccgatggcaccacgggccgatttttaggcttcttctccgtcatggtctatgcagccttctccatcgctggtcctgatctcccagccctagccgcaggagagatccagaacccacgagtgaccatcccccgagtcgtgaagatgactttctatcgtatcgtgggattctatgtcatcggagtcctagctgtcaccatcatctgcagccccaacgacccacgtctcatttccgcaattagtgacggtgctgctggctccgctgcttcgccttgggtcatcggaatccaaaaccttggcatcaagggcctgcccgatctgatcaacttcttgattctgctatcgggctggtcatgtggcaatgcctacctttacagctccagccgaacactctattccctcgctcgcgatggccaagcaccgaagttccttttgaaatgtactgcatccggcatccccataaactgtgtcctcacggtctcggttttgtcttgcatcaccttcctcgtggccagtacctcttccgtcgaggtcttcttctggttcgttgatttgaccaccatcgccttcgttctcacctacacgggcatggtctgtgtcttcatcgcctggtaccgcgccctgaaagcacaaggaatcgaccgcaagacgttcgttccttgggctgcaccatggcagccatacggcgccattctcgctgtcattatcggctccacgaccgccatatgtaatggcttctctgtcttcaagcctttcagtgtgcaaggcttcatcacctcgtacttcggtctagcgttctgggtcgtcatgtttgtcttctggaaggtgtatcaccggagttcgtttgtgaaagttgcagaggcagatttgtactctggaaaggcggagatcgatgaagagtgcaagatctgggaagaaggtggatgggccgaacggcggaaggcggagctggctcagatgcattgggtccggcgaatttgggagaaaatgtggtgattcactgtatacttggtgcttttttgtacatataccatctatcttattcattgaattatgttttcatttgatgtttgctatttccagagcctataaagactaaatggtcaccgagatagaatagcagattatcacagtcggcgagcgtagatagttgtaggataaactccgatttcaacccttagagtcccaatgtctcttttccatgtctaaatagaggcatataagagatgaagtatgtttcaaggttgtacctctcataaactagacgctctgattggccagtgcaggtgatgcttaagggcacgcaccggtggggaccgggactggaaaagaaaagttgcccggttcacctgggcaagcttctccagacctgcgaacaacatcaattccattatgtccaccatgtcaactcgctccgcctggcgagctttgcactatagtgcaaagcgtcgcgctttccaaccctctactccgtaccgttgtttctcctgtgccaaccgtgtccaggagcagaagccagagaatgaccgcatgacacacttcggcttcacgaatgtgcccgaggcagagaaggagattcgaggtaagaatcataatcaccatcttacccaattgaccatctcaatgcaaccaaacccgaacccatacctgaccaacatccccctacagtcggcgccgtcttcagctccgtggcagcctcctacgaccgcatgaacgacctaatgtccctcggcatccaccgcctgtggaaagaccacttcgtgcgatccctgaacccaggctcatgcctgcccgccctgaccgccgaccagcgcggctggaacatcttggacatcgccggcgggaccggcgacatcgccttccgcatgctggaccacgccacgaacgtcaaccacgacatggagacccgcgtgacgatcagcgacatcaacgccgacatgctggccgagggccgcaagcgctccctcgacacgccctactacaacacgtcgcgactggacttcgtcgaggccaacgctgagcacatgccgcatatccccgacgcctcggtggatctctacactgttgttttcggaatccggaactttacggataaacaggctgcgctgaatgaggcgtatcgtgtcctcaagcccggtggtgtctttgcttgcatggagttcagtaaggtcgataacccgattctggatggcatttataagcgttggaactttggtgccatcccccttattggtcaggttgtggcgggtgatcgtgatagctatcagtatctcgtggagagtattgagcgcttccctagccaggaggagttcaggggtatgattcagaaggctgggtttatgattcctggtcagggctttgagaaccttacgggtggtattgctgctatccataagggtattaagccgattgttaaggcttgattgcggacgattgatgtgtgttctgtactatatagacccgggactttgcatactgattgtattactatgagaaatatcattggcgttgatttgcatggtgtatgaacagccttggctgtgaggctcaggcttcggttgtaaatgtgcatctaaaaatgtatgtataaacaaagtgggcgtaacatcgtcaaccgaatgcatgataatgcgaacgatatgtaaaaatcaggtgtgtatatccaagaaagaaaaagaaaagaggacgcttttcagtcatgtcatccatccaatagatcctctgcctccatcactcctaagaaactgtcgggagaggccatatccttcacgacagcaacgacagagactgggtctggtccattttgcgattcacaaatagtacgccgaatctcagccagaggtgtcgagtctggcaccaagagccatttgctttggggtacaacgaatgaagtaccggggttcttggctataacctcggacacacgcacatccatatctccaccaggagaaagaagagcccgaatgcgccgcggagggattatttcggacgaagataacaacacccacgatttagcgtttgggtgctggatggctgtgagaaggatatcgagaagtctgacatcgtcaggcgactgcgatgacgcagaagcagtggggatttgatcgagcgaaaccagcatatctcgacaaatgacgcgctgttccggtggcgcctgtaaattgaaaggagggatcgatggggtgatttcctcccacggaagcgacacagacgaggttggagagtcaaacatcctcgttgacatgccgctcgacggcgtggttagcggtgtctctgccgccgccgctccaatagcaccaccaggatggaacccccggaatacctctgcaggactcttccctgttgcactgtgcagcttccgggccgtagcaatagccagcgcatcgccgagcgccaaggccaccgtcgtggacgatgtgggcgcgcacacaccgaaagaagactcttcgtcctcgtggatcggggccggtaaaagaatacccattcccgcagggccatgcaacgagagaagcggacatgtcgccggatgtgtatgcgacgtaagagcaatcaccgggacaggagcggggagatgcgggagcagcgataaaagttccgccgagcgaccagagaaggatatgagaagaattgtatcattctggataaaccaggtcagtatgaaagtttccaatgtcttatcacaagccaagcgatcgcgattgtaatgcgattataattcaaaagcacatctgtaggcgcaggcgcaggtgggcttaccggccgaaccaatcccaggtcgccatgcaaggcttcagtcggatgcaggaacgcgctatatacgcccaaactattcatcgtcgcctcgattttgcgtccgaccttcccacttttcccaaccccgcaaaccaccagtttcccaccctcgcgcacgctccgcgcaatctgatccacagcgcgggcgagatcgtgctgcgcccgcgcatcggtctggtagatgtgctcgaggtgggcgagagctgctcgctcggttgagatcacatggattgctgtcaccaccgacgagacatcttttggcgctgaaggatcggaggaattaggaggggtgagaggccacgagggttcgtgggcgggttcgaatattgacatggcgggtgcttcttgatatctatagcataatggctagaagtaaaaggaatttatgagtgaagtggtctcttcgcacccctgggcgccggttaacttgcgggggccgatccaagatcagtcgataacggaaggtaacagtgggcgatcggagatcggtgttttctcgtgtgagaccggggattacatacatcttttgcgtggcgatttgacagattactatgctgcaacgtacccctttctaatcttgatttcgtgccaatgtccatagctccgtctaaacccgtctggcaaaatggtgtcattttatgctataatggtgaatgtggaggccatacttgcctattggagtatttccgaggccgaggcataagagaacctaaaatattagtttgaacggattttgagcaatggaggtctattcaatcctcgtatgtatagagggtataaccaaaaaaaggagagaaagcaagccccgaaaatagtatttacatgccgttggccgcggggataattgcaagactctcccgctgatagtagcttctagcaagcgcagagaccatatttagaactcggaaatactccccaaactccaacaaaaaaaaacatcatctgtcgcacacgagaagacagaaggcaggggtatcgcatcaggatgtcgcgtcgctaggggtcattatgagtatgcctcaataggcagtagtaaatcatcgtatcatccttgtcgaccctcctgtttgtctttacccttctctgccgtgccatcatcctcatatagatgatgctgctcaatgtaatgaatgactggaactgggatgagataacgcacactcatctcacgtcgcaagaagagtcgaatctttgtgctgctaacatcattctgaatgagctgctggatgacatggatattgtctttccagggctgcaagctggccagggcttcatcgatatcggtgccactgcgctccacaatgaaagactgaaaggtgtattagcgacccatttctcgagcgcaggatgaaccgttctggatgttggaataaacttacgccatattttcctaaaatatgatccagatccttctcactccacacaccaggtgtggacatggtatggatcagatccgcaccggctaacagagcaatgcgaacgggcttccgggttccgtttccggcgtccacacccttacggacctcattgatttcatgatcaaaatggtccagcaccacagctgttggctgataggccttctgaatcggttcccatgtgtccaccatcaaccagtcggaggtttgatcgactgcaagttggcacatcgcaaccctatagatgaatctccgttagctccgaatagattgaataggatggaggtagaatcgcctaccgatcctccgcactggccaagccggctttacgataggcatccgacaccggcgataggtatcccccaatgatttcaaagtccgtgctgaatctgacgtgatcggcagccatttcgaacattctgaggtgtaaataggtaattggggagaaggaaccacaagcaaccagcaggagaggggtcttttctgggtctttcatcgtccgcctgaggcgatactctgggaaggtgtagtggtccatggaggcgggggtagtgtcggcgggtatctggtggacatcatcgctctgcccgccgaccatatcggctgccatggagagatagtgaatagaggaatatactagaagatcttgaattccggggaaggcaaaacggtatcggagaaaggcgggggagatgagaagtgaggatgagtttctgtgaattgcgaatggggggcgaaccgaaggcggcaagagaatgcgccggagaaggcgaacggaggtgaaaggtgaaagacgaaagatggaagaagtgaaatgtcgttcttttttcctcgtttcttcgcccttttctttttgaatatcacgttctagccctagagtttccccgtgattaataagatggctcggtgagtcaatccagttctactcggtgcgtctccgcgatccggatcgatcgccgttatattccactttgggggttcataataataatgaagagcgaggtataaattcagtttgataaggttatttgagctctcaaggtccttcattcttacctataacataggtacggagtggttcggttttatcgagcactatatatacatcaaggtactccgatggagtgagtatattaataaacgtctttgtctgtattcaaataactggatcatactaaatacaatagatgtaccatataaaaaaagatatacaatggacccttgagatattattccttgtgatattccttgccatttgtactgtcaggtctcagaccccctctatgcccgatatccaggcaagatgcaaataaggaaaccaagagagccatttagaagtaatcgtgcaataaagtattataataagtagcacgtataataggtaatgtatacagtatgtccaagtaactatacaaggacctggttagatcatcgaaatgttgcacttccgccgcctgacgctcgccgaatcccatcaaccaccacgtcaaaccctccttttctttttcccctttctttttaacccccccaccatctgaaaaattatcttctgtgtgaccggaattggtaaatcgttcttttcttgagatctcctagccccaacggcaacagtaacagctacccgaaacatcgttctcgccagccctctcggctagccttcgataggtggatggcgggttaacaacggtgacgactactcaatcgagattcctatacccgataacttatggccaggcaaaggccttccgccaaccgccaggaccctctcgaggattatcccgtctcccccgcaggcacttcggcctcttcttccctgaggtagtttcccattttcttcgccttcacaagtacactggttgaggttcagactcatattccgtggaccctcactgggaatctgttgatccctgagtgctcgtaccccccaatctgtcccctggattgttaagtggatgctccgcagtttcatcgggatccatcacttctgcatttctagattcgtcatctgtctacccaactatctgcctatcgctttgacccatcccggacttctttttctgtctttttctttcttcagaccctaatatcatcacgcataatctaaaacaaaagaccactttctcatgtcatccagaataactcgctcctccgcgagactcgccacagaccctccacctgctgagtccggtacaccgcttcaaacacctggctctacctcatcccggaaacgcaaggcatcctcccgccacgaccgacaagcagacgccccgatacagccagcaccggcatcgccccaaaggaaaaccaagcgaccgcggactgcagcatctcaaacagctccatctactggtcctgttcctgctgcaccccgtcgaggagcccgcagccgtacagccatgtcacaaccggggtaggtgatgatgcacattgatggataagaactagggctaacctcatctcagaccttcatctcgaccgtcggaggaatcatcgaaatcgacgacctccccacaaccatcgaggcgaaagtcaagtcggaacggtgagttttatggatgacaatcggccgtgtcacacaaatttgtatctgatgtgctagttactgatcccttctctttatttatagaccgacccgcgacgacacagtccccgccgccccgacgcccgaaaaagcgttcgggcaagtcaaatcccgatgttttgatgagagatgcagaggaggaaatcgaggaggaagagcatcaggaagaacaacaaggatctcaaacgggagagagcaacgatggcaccaatccctcggcgttcggtgatgatgatatggatccgttccacagcagcctattcggtggcagaggccccatgggactccagagcactttacgtgccctcactggcatgatgagtggcatgtcatcacgtcttcgagatattctcaccaacttgagagcgaaggatgatccatctctccaattgatcgccttgcaagagctgtcagatctcttgcttgtatcgaacgaggataacctgtctggtcaattttcgccggacccgtatgtgaaggagctcgtgactttgatgcagccaaatcagtttggcgaagaaaatcccgagattatgcttcttgcatgtcgctctcttgcgaatctaatggaggccctacggggctccgtagctaatgttgtatatggtggtgctgtacccatcctctgccaaaagctgctcgatatacagttcatcgatctagctgagcaggctttgagtacattggccaagatttcagtcgacttcccagcctcaatcgtgcgagaaggtggattgaccgcatgcctcacgtatctggatttcttcccaaccagtactcaacgaacagcagttagtacggccgctaactgctgtcgtaacctccctcatgactcgttccctgtggtgcgggatgtaatgcccaccctactcaacgtcctctctagcaatgatcctaaggtcgtggagcaagggtgcctatgcgtatcacggattgtcgagagcttcaagcaccgaccggagaacctggaggagctgattgagcctgcaatgctcaaagctatccttcggcttctactgccaggaacaacaaacctgatcgggcctcatatccacacgcaattccttagggtattggcaatcgtatcgagaacaagcccacgattgtcaaatgagcttctcaagatggatgtagtggatacgctttaccaaattttgaccggcgtgtcaccaccgcaggatgtggataacacggccgttaagatggacagcgtgctagtcatgcaagcattgattcatcggccccgtgaacaagtatatgaaactctcaatgtcgtctgcgagctattgccaggcgttccaagccgcgatgcctcaaaaaccgacaacctcctaagctcatactttgatagccacatgtccattggactgagatctcccaaatctaaagagacagtggaggaaaggcggtccttgctcgttaattgcaagactgagcttaagcgttttgcgatgattctgttcccaactttgaccgatgcctactcgagcacggtcaatctgcatgtccgccagaaggtcctgattgcacagctgaagatgctgcatatccttgagccttctttgatcgaagacgccctgcgcacagtcccttacgcttcgtttttggctgccattctgtcccaaaaagaccacccttctctcgtatctttagctctacgctgcgctgagctactgttccagcggcttgaacatgtttatcagcatcaattccaccgtgaaggagtgatctcggcgatcatcaaactatccgaaggctctttgtcaggagaccaggagaacatcgattcatccgatccctcacgtataaacacgagcacagattcatcgcgtggtgctaatcaaattgttggagagactggatctggcggagatgatgaggatgaagacgatgaacccgatgactttgacgacgatgatggcgaggatgatgaccaagatgacatgtctgattccgaagacgacttcatggccggcccacgcagtcgacaaaagatggacaatgcgctcaacgacgtagttatccaagatgcccaagctttcctcgaggtatatgaagcaagccacggtgaaaccgttcgagcggaggctttgaggatcttgacagcactgaaatccctcgcctccgaaataaaatcacgctattcccgtggcggtgagggtggtcttcccttatttaaacagctcgcgtcctactttgacggagacgccttggagggcattaccagctcagaattgctcaactccggcattatagacgttcttctgtgtgtccttggtaactttcaatcgccctctatccgcgatgctagagccgacttcctgcgggcgtttatgggtgtttcaatctcggacaaggcccaaagccagagcaccgccacgacacctttcagcgtacttatccgcaagttgcaagacctgcttagtaggacggaacatttcgaagtccttaccattagtcacaattcgctagagaatacccgcagcaacgccgcctacatgctgagcaaacagctccgactcaagctggttgccgacgaagggtccgaagttcctcgtccttatcgcaacatcatggtgtcaatccatgccattgctacatttaaggccttggatgatttccttcatccccgaatcgccgtggcggaaaaacctcgcccctcacgaacaagggactcaattctctcacaaattgccaatgcatcccgacttcgtgaacagctggcttctgggtctgggatgagcctcccaaatcccacagggggtctccagggcactatgaccgatcccacggatggtgtctatgattcttccaccgatcacccgcatcatcatcagtccaatcggattcaagaagaggaagatgaagaggatgaggagccccttgaatgcgccgatgaaaggcaactgaccgacgaagaagaaggcggcgaagaagatgagggcgaccaactcaatgccattgttgatgatctcgatgaggatatggaaaatgatgatatctctgacccctcggcagtcaacatggaggtggcatcctcgggcaaggtcacggctcgcaaggaagatggtacccgaattgggacaccctcccagaccgctgcatccaagccttcatcgtcagctcctgccgctctccccagtcacacgcgcaacagttctctcgccactgccgggcgcccgttctcatcgtatgccgctgcaatggcctcggtgccccaggactggcaccttgagtttttcgtagatggcaagcccgttactaatgagacaactatctaccgtggtgttcatcacgaccgtgaggacttggacgagagtagtgccaagaacgtctggtcggcagtccacactatcacatttaagcgcgttcctggtcctccgccgccagagccctcaacccttacaccgaccgtccaggcttcttctgagggtgatgcccttgagatcccggcctctctcgacaaagacccaacaacttcatctatcattcgcctgcttcgtgttttgcacgaaatgaacgcaacgattgatgatatcttgaccgataccaaagactccgccaccatcacctcggagcccttggctcaattcattaacacgaagctcaccgccaagatcaaccgccaactcgaggagccgttgattgtggcaagcgattgccttccaagttggagcgaagacttagcaaggcttttttccttcttgttcccattcgagacaaggcatctattcctgcagtcaactgcatttggctactcacgggcgatgatgagatggcaaaattctcaaagtggtgaagacagccgacgggacttgcgccgcgatgatcgcccattccttggccggctgcagcgacaaaaagtgcgcatctctcgttctcgcatccttgattctgcattaaaggtcatggaactctatggatcttcccccagcattctcgaggttgaatatttcgaggaagttggtactggattaggaccgacccttgaattctactctactgtttctagggagttctcaaagaagaagcttaagatctggagagacacggacggaagctctaccacagaatatgcatttggcaagtctggtctgttcccagcgccgatgagtgacgaacaagcatcccaagatatcgggaagaggcaattaaacatcttcaaggtcctagggaagtttgtggctcgctcgatgcttgactccaggatcatcgacatttcgttcaatccagcattcttccgtatcgcggatactctgtcatcagtggcaccatccctaggcaccgtcaagctggttgaccacgacctggcgaagtccttggtcatgctcaaagaatttgtcaatgccaaaaacgtcattgaggcaaaccagtcgctttcgccagcccttaaatccgaggccgtgcaaaacatcacggtccacggtgctagtgttgacgatctgggcttggacttcactctacctggatatcctgcgattgagttgatctctgatggcgccaatgtgccgttgacaatcgaaaatattgacacttacatcgaacgggtcatcgacatgaccttgggtagcggtgtccggcgtcaggtggatgccttccgggctgggttctcacaagtcttccccttctcctccctttgtgctttcactccaagtgagctcgttatgcttttcggacaagcggacgaggattggtctatcgagaccttaatggactccatcaaagccgatcacgggttcaacatggacagtcggagtgtgcgcaacctgctgcaaactatgagcgaactggacaaccagcaacgccgagatttccttcagtttgtcactggtagccccaagctccccattggaggtatgtttatttcatttttctccacataaaatcccactaacacaaactcaaatataggtttcaagagtctcacgccgatcttcactgtcgtgtgccgcccaagcgaacatccatatacaccagacgactacctccccagtgtgatgacatgcgtcaactacctgaagttgccggactatagcgacctggacgtactcaagaagcgcctctcagttgccatcaaagaaggccaaggagctttccatctttcttagacctgtggacagctgttcccactcaaaacttccaccatctcctcttctctctcttctctttgctggcttccgctttttttgaccagaaattattcacgatgcgacgacgtgcgacttgtttctacttcgttcctctccaattcccaagttttcggacgggctgtttcgctgttcttgtcctttccttcttcatatgccatctgggtcgaaaggcgtcatggcgggggctccttacgatagtgatattagatagcaatgatcactttctaccaaaagtctagtttttccggtgtagatagtcttatattgaggtaacatttggtacaaatgtactgtagtacaaagactagtccaatgaaacatggtgaggacgtagggatcaattgccccattaaatataatggctatctcacattcctccgagatcaccgatggatcacccgtggatatattcatcagactgccgtgttgaatgaaataaaaccatccctatgccatggctgcccctcgggagattaccatcgaatgtctcaacggccgttgggttctggtaatgatactattccccttgaagatgctatattctaatcgattactgtatacagaataaggacctgaccagcgaggcagaccctattctaaaattggttcgaaataatctgtttctacaactttaaatcctaagctgatcacgtaccgtccacagcaaaaagtaccttggttgctccgcaaggcattcgaattcgcaacaatatacatccaaatctcccaataccaaacaccagcatccgaaacaagccaaccatctacgagtatcgactttacccagacagccacagcagggctggccgcaaccaaagaagaacgcgtcttggattggaaagtattagaccacgaggactacttcttcggcgaggtcaaagcacagagtgaattcgtccacggtgttattgacgcaggtggaatcataaggcctgaatttgagcttcagacggccatgtctaatgaccagattaagcaatacttacgaggtgagatccaggaggatgggagtaaatctaccggttttctagttgaggactggagtgggatgtctgaggaggggcctggtctttgggtacatacctttgagcggaatgttaagtctggctggacagctgagcaggtcagtatttatagttattgttggatgatttaaatgaaactagaggctaactgacttgggctgcagatttggggatttgagatgtttggggactcgcgatacttctctcgtcgaggggtgatcatgacgacgaggggagaatatatgtgtgggagaattgtgtttgatttcgtgagtacttaatgagcagtcttcgagaatcaagggggaaattaggaatcaatcattctacttatctatctatcactgactttatgaatctaaaactctataactatgtataacgcagggacatgatatcaactttccacacaaagacactctagctcgaataaaccgacaccatagactgtgaaaactgttagctaaatctaccacatacgggtagaataaaggggaactcacgtctgcaaacttgggctcaataaacaaagccttagcctcagcaaccattaccgcgccttcactgtcctcatgcagcagactagcatcaggaacaatggtatgcccgtccgcagacaggggcacggtcaaaggaagataagtcatgcggccctcaacccaggccttcctgccctcgaccttaaccgtctttgtgcgcatcacatacattcggtcgggaagagctggctttcggaaatccacattaagattcgccgtcatgcccagcccgctggggaaagccgcagagacacagcgcgcaaacacctcatcaaaaagaacagtgagaagaccaccatggacaaagccagggtgaccacagacgtcctggccgatatggaatactgatacaacgctgctggctcggtcggcactgtcggtccctgtcccagacttgccggtcgagagccacatatatggtgcgaatgcaagcttgcctacaccagtcaagctgccgcccacgaagtgatgctgtctaaggtgtggcgggattgcaagatggggacgtgtttccttgtaggtgctctgggttccgcgcaatttctggacgagagggacatgggaaacaagtttgtcgaggcctgtccgttcgttgtgcaatgactgggtctgagacagtaatggggatccgtcggtttggctagggagtgcttggtcatgaacgaccgccgaccggtttgggtgttgttcatggagacgggcaataggcgccgcaggcgagtatgttctgaatgctgaaaggggttgcgaccggaacagccgacgcgctgtttgtgaaatgtgcgacattctgggaagtatgtatgaagttgatgttgactgtagtgatgcatgttagaaggggatttcgagggacttgttagaatgccgaaccgaggcacggcacggagtacgtacatactgcagagcaggctcgggttattcggctcgtgagtttgtcgatattcctagtgttgatatgtagtttggatcaaggctaggtgatatatgaagtataccacacttggacttttgcagtgacgatgatggcaagaagaatgtttcgtaatcttaagaatagacccgccactctctggattagtcccgtttctgtttccagggtttttcttatctttttttaaggccgattttcccctgctggaaccaacagtggggctcaaagccttggaacagccgatgatcggaccgtaatgccaagagatttagttcggtatgccgagaactataagaagccgtagatccatgtcagtatattattcaacgtaattcaacggagaccgaagactgaagatcaaagggtgtagtattgttatattagcatagtatggtggttttcaatgggggtccttcctcgttggggggtcaacatgcagcacagaaaaactgttgtctcatggcagcaatcattctcgtcatctccccttctctttttcaatcaaagatcatcgtcatccagcttggatgcagcctcttctcttgtattagccttcatctcaatattgactctcaatcttatcatctcaagatctcaagatggtagacgaaactaacctctcttcttctgacgaggattctggccccgagactgtcagcaacccgttcggctctggcgtgggtagtatcccccagaccatcaataatcctttcgtttctggtgtgggtaataccccccagactgtcaacaaccctttcggctctggcggggacaatccctcccagataaataatcctcttgcttctgcagtgggcaacatcccccagggcaacaactcttctgtttctggggtgagcaatggcccccagatcaacagacctttccgtactcgctggggtccccctctgatccgccccatcgccatcgaagacggccccgtttcccccaatggaggattgaccaatggtcactcccacgtaaatgaatggcgcgctccccacccaacggacttcaatccgttgtacgccccgcccgacgacgagaccgacgatgaggcagaagccaaccctccacccccaaaccacgaggtggtggatgaattcctcgatgaggacgaggacctcgacgatgcctcagatgaggatgaaggggtctctgccccgtatggcaacagccagggcctggaggccagcctggatgccatcatggcggagggaaatgaggaggatgaggctgacgaggacgcctacctggacgaggtgtaggcaagtaaatgcttacttgaatgcaaggtatacatcacatttccttttctcctaagccccaatcagcttcacttcagtcttactatcacttcaaactcatattcgtttcaactcacattcgcttcattgctaactcatttccttgtcatctaggtgctggtgagggaagcggcgacttcctcatcggcttcctcagccttgcggtcccaccacggctgacctcaagcgtggtgggacacgaatacaatgatgaagtggtagggaggaattgggggggaggaggagattcttgtttgagttggcccgcggaggctgacgatgtacgatttggacggcgacatggggcgtttgctgtgtcactccggtctgcaggatgacactgcactaggttcgctcggcgtagctgtcatgcgggccaggggctactcattgagtagtcccgctgtattgagtatccttccttttgtgttgagcgtgtttgtttttgagctgcgatgatcacttgatcaatatcattttcatttcaactgccccttgcgacactcttattgcaccggagaggcacatcaagactggaatgggctgacaacagcgctgctgtggttcggaagcagggagagcagagtcgagccctcgtgggcccattccgaatgttatgcgcccacaatacgacaatacaatacgataccatacgatgcgatgcgagaacgaattcacgtcgcctttgagttgacattttggagcctgcatgcattgtcctaaactgacttataaagcgcagcaatcaaccaaaggctggctggtattcgcgaatgtaaagcggctgtggcggctgtggcggctccggctctcatgaactcactgcaagcagataaagatagttacttctactctgccggaagtaaatgattaacatctcgcatctctaggagcatagaagaactaatacaaagcggactttgatgctgacctacagtatagaccgaaaagttggatccctagtttaccgactccacaatctgtattccgggaaggccgaatacatggaatatagtccaataaagctattggtgcatttgatactgaccaaacagcttctagaacaaggtaccgtcgccaaagttcaagatgggactacactttgtctccggacgcttagccgctgcaagctcacgacccgctttccaagagcccgcctccaacacctgaggtagagacaattggacaccatccaagcgagcaagaatcttcgtatgcagcacatcgaggagagcaacagtcattgctcgccattccacaatctcatcatcgcccgcaccgaacgaaggcaaactaccacccgaaaggctcaaccctcgctgcagtgcctcgggcttcaattctagcactcccatgtcgacgagcattcctccattgcggtactccggcagaccagttcccagctcagtattggaccatgagactgagagcaggcgagagaacggtaccatcaacgagtaccctagccattgagtcagcttatggaatggttggatgttggagtaggggttcgactccgatccagcctgctgtgcaagtgctcgcaggggccatgcatcgccaatgggctgcccattaacgtgagtacgatcagacggccagatgggaatcaggaggcgctgtagcacgttccaaagatcccggtaatcgagctttccgctctcattggactttgcaatgaggtaatctagattttttgggaactgtttagtgattttcttgatcttatcggtggtatgaacttaccaacaagattgccaggacggccagagggtccaaaaatatctttcaagttcatcaaagactcgccgagtttacggagaatatctgcacgcgcagatactccgatcatgggattggcatcgtcgacctggagtccacgggataagatgtctacattgatatttcgcaatgcatcgcctagcacgagtcagccaatatcgcattgaatataagagcaaacgcttaccattgacggtgtgtttcaccgatgagttctggcccgcaaagtcgccgttgaggaacatgtgcagggccgccaccgcaataccttcgcttcgattcagcgtcagaccactttgtgcctccttgaatttccaaaagtctccagcaccggcatccaaaaggacagagacgaagaaaagatctatcagcctgcgtgtcttttccgtggtgtcacatttctcctcatcccattcagctagaagagtggctatgcggggaaccccgccaacttcgaaatgctgccagcgtccatgaggcggaatcaggtgatatctgtcagggccgaagtcgcgctatgatagagagtgagcttttttatgcttggaattggaagtgtgcgtcctgggtatgtgccagacctacctgaatcagtttaagtacgtagtcggtggcatcttccatgcgttcggggtggtaattgaaatgattcaaccgatcctcttcggctagtttgaggacaatatgggctcttgtacggacggcttctaggcctaatagttcttcaatttggggatccatgttgggagaatggaagaggtgactctgcaggttaagaaacgtgttttatttactccaagccaaagcgggggaacttatgcacttatctatacgtatcgcatttatcttggcgtgtggggctttcctatttgatctgccgccgcttttacgaatactcaggctcagggtcactgagtagatgtcagcacggagatcagtgatcatgctcagtcacgtgtagaatgactgatgctcagtgaatgctcgaggttgcattggatgctgtcagtgatgctcagtgtccaatcagtgaggtaacactattcccagaagggattagcccctatagggtcgtttagtactgatcacctcctacatggtcaatattcgaataagcaagtgtagggggttacttcatgaccattcgctttcgaggctactacatatgttgtacttgatttccaccgttgtttacttcaaaccccactgcgggatcggcgatcgtgcacgggcaccaccgaggtagaaacaccgtcggagagtcggagagaagtcggagtcccactggtcctcgtatcacttggccatgtctctcgagctgtatcacactgcatataacgccggccagaccactgctgtactaacccatggcgccttggtatctggtctctactgggatctggtgatccccacctcacgtcttactagctcctggtcccagatcttccgggccatggcaagtccgccggtacgccattctcagtggatctcgcagcgcgacagattgtccagctgatctatacatacgcgaatggttcagcgcacattatcggctacagtttggtacttaggttgctatccgcctggcctataccgaaccagatgtggtgaactctgtctttatctcggggtttagaacgttctcttaaacgtcacttacgccgtatattctatatatagcgtgggcgatgatacgtatagagaactacctcggccggtctcttatcagctaggcaatagatggtaccgatatcccacgtattgatactaatgtctgtacccttgacctgtgttgccagattgtattaccagagcatcctacacagtagttatcaccatggcctgcgcgtactctgattgttgtagcgggggttagtgcctacaaaggatagccccggtgatgctgtgaagttggtggcgatcgggagagccgaatgaagagactatcgcgtatacgcacttgaaaatgcgacatccgtggaatcgtctggaaccgcggctctttgcagagactgccacggcgtggtttaaacataaggagcttcccgagggctttgttaagctttagcgtcgggtagacggggtttgaagatacataggagtttatcccagggcttggatccataaactccatatcaggaactgtaataatgacagatccaacagatccaagataaaatagaactgtggatggcaattgtcgggggtgctcagttttacccagtgatcaaaaagcggcaagaggtgagcactaatacggaagggaaaggtcttaaagtgccaggcattatccgcatgcccagcaaactagttatctttaggcaaagtgtcttgaatgccatcgactatcctcggccattgggggatccctttgtcaccgataggttatctgacacatatcggacttccccgataacgttgggctgtgcactttggaagcatttaggagtcaagtatatatcagtaattttggtatagactaataatcaacattgtcatttttacaaccccattgcttcagtaatttccgaattagaatgtcagagggtcaaggtggcccaggaacgcatcgttgccctcaccacggagaagagcatcgatgtcaatgcgaccggccgtaagatacttctcgctaacaccgatgttcactcgctgggaaagttgttgtttaagctccgcacgaagcccggccatttcggtcttgctcacttcgctagcctccttgtcacgtctttcgcggccaccaccacgaccacggcctctgcccttagacggatcgaattcgtcactgtcatactcaacgccgagatcatcggccgcagcgcggagccagttgtcctcggtgttgaccttctctttagcaattgtggagtctgtaattcgcttggcgagagccatgcgggggcggaggcgggcaaccactcggcgatcaatgtcgagagactcgagagcgatcttcttgctaggtccgtcggggtcgccggccttcctcgctttcttagtatggaccttgccggcgagacgggcaacaccgacaacctcctcgggagcacagatgaggatactcttcccggactcaccggcacgagcagtacgaccggatcggtgaacgtaggcgtctgctgtgcggggaacgtggtagtggatgacgcaattgatgcccttgatatccaaaccacgggcagcgacgtcggtggcgacaagaattgagcttgggttggcagtaggagatgagaaacgttcgatggaacggagtcgggctttctgggccatatttgagtgaagtgcgaacacaggaagttgaagagcctgcaaaagctgagtgatgcggcggacagcggagatggagtttgtaaacacaattgtgcggttcttgggatagtagagaagaacggagtagagatagagatcctgatcatttgaattagtatcaggatacgagtggtctaaaaagaaagtggcttaccttttccatagcagggcattcgacaattccttccttgagtccaatggccatctgtgactccgggttcacatcgacgaacttaggcttctcttcgcggaaattcagcttcttgagaaggtactccatggacgctttgttgtccaacatatcactacttgcccagcggcttttgcctgctagcttttgttgaagatccttgtggaatgtggccgagaagacaagagtctgcctttgggatggctcctcgtcctcttcttcctggtccatgtctgcaatatctccggcttgatgtttgtctagtgcattaaggatatcttccatctccttgaaatgaccttcactcagcagtctgtccgcctcgtcaacgactaggaactggattttctgcattttgcggatcaatcccgttcctgtacttaggatctcccacactcggccgggagttccaatgacaatatctgcagtggcaagttgtctctgttgcttctgaatagacataccaccggtgataagagcgatccgcgcattagtgtcgggggaattggcaatgagctctccgatatgctttccaagctgatgcgccagctctcgagtgggagatagaatcaatgcaatcggggatttgttcttttcagactgttcggactgttcctcttgttttcctctcttgtccaaataatgttcgataatcggaataccgaatgccaatgttttaccggaacctgtagaggcctttccaacaacatcgtgcccatcgagaatgagaggaatactggctttttgaatggctgacggggagctgaacttcattttcgaaagagctgtaaatgtctctggcgaaagattaaggccatcccaagccgacacgtcgacaccttcgtcctcttcgacatcatccagagcagtgaatgagagcccggccttgatgttccggttctgaccaggtttggactctttagacttttgctccttaggcttttgttctttggactccttcatggctttgttttgctccttcttcttgtccttcttcgacttcttatcttccttcacttgagttgtagtgggagccttctcgatggtaggtgactttttggacgagtcctcatcgctaaaaccaccccattcgtctccgtcatcttcggacgggggtttgataatcgattttgttggcttgccagacttggcctaccacccaaccacagatattagcatttagttcaacatgatcaagcaaaacatgcaatttcataccttgaaatgaacacctccgtcgctctgttttatgatatccacaccctcaatctcttctagtccaaagaaaccttctgcatcatccattcgatctggcatagcaacttctttccagttgaggtcctcaacaccgagagagccatgatcgtcgctcgaagccttgtcagacttgactgccttcttgcgtttgtttgcctcagacacctgggctttggggtcgcgtgctcgcttttgacccattatgaactgagtaattcttgagtattacagtgtgttccggtagacaagtgatctaattacgccgtcggggagaattcgcaaagaaaaaaagcggcagaaattttagtccgcctttagaatcttatcttttcagtccccacgttcgccgcaaaattaacccactttgacagacaattgcgactaagcagacattttttaatatgggtaaatcatccaaggataagcgcgatgcttattatcgtctcgccaaggagcaaaattggcgcgcccgttctgcgttcaaacttatccagattgacgagcgattcgacctattcgagcacgagaacccggacaatgtgacgagagtagtggatttgtgcgctgcacctggaagttggagccaagtactcagccgtgttttgataaagggcgaaagcttcgggcggcgggcatggctcgagaaaaagcggaaagaacaacagggattggagggcgcagagacaacgacgggcgatgacgatgacgataaaatggaatgcgatgagccttcttcgagctctgaattaaagccccgaaaaaatgtcaagatcgtatccatcgatctccaaccaatggcaccgctcgaaggtatcacaacgctcaaagctgatatcacgcacccctctacgatccctcttctcttgcgcgctcttgacccagaagcatacgaacaaccatccacatcctccgattccccacaatctgtcacagaggctatcagacaacctcaccccgttgacctggtcatctccgacggcgccccggatgtaacaggtctacacgacctggacatttatattcaatcacaactcctctacgcagcactcaaccttgctatgggggttctccgaccaggcggcaagttcgtcgccaagatcttccgtggccgcgatgtagaccttctctacgcgcaactgcggaccgtctttgagcgcgtcagcgtcgcgaagccgcgcagtagtcgcgctagtagcttggaggcattcgtggtctgcgaaggcttcattccacccgttactgacagcggggtggtcggtatggccgcactgaaaaatccactcttcggcggagccgcagctccagtagccgtgtcagaagacggcaatgtgggcgtggaagttcgcgatgaaatcgaccaggacacacaaccccggaatactgcggcgcaacccgcgggaattagcactcctgcgcccaaccactctattgaagtccgtcaccttcaaatcacaaaaccacaagaccaggcccaaccccagaaactgtccaacaagttcgcggttgagaatcggtggattccgtcgttcattgcttgtggtgatctttccgcttgggattctgatgcatcatacaccctacctccggactatgttaatctggatcctgttcagccacccactgcaccaccatatcgtcgagcattggaattgaggaaagaaaagggtggtgcgtatggcaagaccaagtatggacccattcgtcatgtttgattgttacgttaaatgagttgcaagcaaaagttgtatgtatagacgacatagacacgacatagcattttcgaaggtcatgctaggaaggctgtcttcgaagcagatacccaaatacattccattgaattatatatacttttaatcaattgaggagagattgattcaagatgttgatattctaaatgcatttttgaagtcttccaaggctggtgcgctagcccaaatcaggatctacatacaatgaggggggaataaaagcaaagatatgccaatcgtgcaaccatgccatgcgaaaaagaaaacaacagagtctaatagacctccaggacatagcgctcgtcgtccttcagcttctcaatctccttgcgagtctcaaccttcttaccgttcctcctggcttcggtggcaatagcctcctccagaacagcggtgacatcgggcacgggccaagtgggaccacacaggtagaaagcaccctcctcacgaatgtaggcctggatgatctcgggtagggtctggcgcatacggtcctggatataaattttctcaggttgatcacgagagaaagcagcgccgagcagagtgatgacaccagcctcctggtaagcctcccactcctcgccgtagcagtactcctcccgctggtgacgagagcccatgtacagcaagacagcgccaatctccttgccctgagccttctcaagggcacggtgctggacgaaggcacggaacggtgcgagaccggtaccaagaccggccatgataataggctgggtggatttgggaggcagcttcatgacgctggacttgacactgacggtgatctgggagccgacttcgaggcggctcaggtagcgggtggccagaccgaagcggtcgcggccgttggggtcgacccagttcacggcgacaatcatcagggccaccgaggtcggggtcactttctggcacgaggcgatcgagtactcacggcgcttgaggggaccgatgatgcggacgatctcgtggaagtcggggtgggcggaggggtactcaagcaggatgtcggcgaaggtgatggtgtcaacttccgcgcgacgcttgaactcagtggcaccgtcaggaccacacagggtgagcaagtcggtcttttccttctcgtcagaagcaaattcagcaagggcctcgtaaaagcgcttgggtgggcgaccaaagatgtcgacgttctggaccagagcctggtagactgtgcggttctccagaacggcagggtcctcacggctgggaacctcgacaatcgcgtccgggtccaagccgtagaacgcaatgaaattcttaacgtcctctggatcgttctcggcatgaataccgagggcctcgccaatatcgtacttcagaccagtctcaccgagatcgaactcgatgtggaagatattacgatcataggtagtaggggtgagacggcggttctccttgacgcggacagtgaaagtcttgtgagcaagatcggggcggagggcatccctcgtgccataagcctccttgaacgcaaggccgcgtaccgcggtctgccagtccttgagaagagtggggggctcagactcgtccttgtcgaaggaaacaaagctgttggcgatgatgtctttggggagctgaacggcatcgcttacgccatcaggctccttccaagactcgggaacctcgatctggcggagcagcttctcgagatctttgattacatcgaacagggcctcggcatgaccggtgatcgggaacagcttctttattgccagtgcttcctgggtagggaaagcgacgcgaatgaacgaagcctggagaacaaaagcgtccagagacgagtcctcgatagcagatgggtcgacgacgaagacggagatgccacgctgggcgacggcttgcttgaagatagcaggaagctttttctccaaatcctcatccttgatgcccggggcattcacaatcaccttggcgttatccttgacagaagccagaacatcaacatcgttgagcagcgagatgttgccaacgtaagtgacgtcggcactagttaccgcgtaaggtgcatcaacaatcttagcactcttgcggatgtcaacgcggatggcaccaccctggacgagattgtcgtgagtcttgctgagggtgacgttgctggccgagtcgacgccaagagcctggctcaaagtctgagcggctgtctcggtaacggaggtgtcaacatcccagaaagtgtattcctgcacagacgcagggtccaacaactgcagcgaagcgttggtttcaccgctgacggtgagaataggctgatcatacacgcgctggaatacagcggcggtggaaataagatcccagcgctgggagcgggggtacttgatctcaacacaagtcgggttgtgatcacggccagtggcgaaagtcaaagaagcaagcacatcttcatagagagcggagtggatgccctcttcctgaacagcttgctcagaggcgacctggccgagaactgcgacagtcttggtggactggggaagaacgcgcaggaactcctcctcgatgaagggacggtagacccggacattcacaacaccgacacggacaccatccttcgcgagagagcgtgcgatttgggcggtcagagtagcctcaacagtgccaaaggcgatcagtacagaggtgggctcggagtgaccgtggtactcaaaggcactgtagtcggttccgagttcaccgttcagggtcttcagcagatccaaaaccttgccttgggcgtcgaggtgacggttgcgggactcatcgagtgtcttgcggacggtctcataggtgtgagtcagtccatccttgtcgaggacatcaatgactcgagtggtatcacggccaacacgaacgccatcatagatgtggatcgaggggaggactgaggcgagcaacgtcgtaaagagagccatgtgctgcgactcatgagcagaaccgctagagactagacccagaccgagatcctcagccagggagagagcagaggcatagtcagagactaggccatcctcgccggcgtagtctacggcggcgacatgtgcagcgactgggctagcgacggaatagagcaaagagagttgctccaatgcggagcgcatgtaagggagggttgctgaagaagcaacgataccctgggggatgtggcgcttcttcagatcaaagtcctgagagaaaaggtagccaagagccatgttgccggcaccctggcgggtttccagagtcttgactgagggagactcgccattggcattagtctcgcccttcaaagtccattccttgagagcagcatcaagatcgaaagtttccggcgagtaggagaagatcttgtcactcagcaagtatgcgacttgctgaatgagtgtctgggctgtaacatatgtcgggccactcaaggccgacagacctggaactgatgaacccatgacttcttcttaacaccggatataggaccgatatttgttaagacaaaaaacaaagaagaaggtggggagaaagagaatgtcccctcttcatggcttggttatagagaaaaaaccccaggtaacttgcccaaagcggttagtgtaaattgcgtgcttgttatcgggcgataagatttttcaaggcggtcaaaagtggcgcccgctttcggagcatcggccgtgcctgaagcccgagattatgtcatgaagtaatgcaccagccacgtgatgtgtattcctgtgcatacttgtgcacggggccgatctaccgcaccgagcctcgggtcaccttaccccagaatgcggagaacccctcataaaatattgatcttgatatgtaaacggcagagtacgcatatatacatagttcaatgcttattttcagctactttttctgataacttatctctttatcgagtcttccatcatggcatataactcaccaaatcccatcccgttctcagagccgccttacattcgtggcctcccttctccctacattacgcctgcccactgccgctttcaacaagcatgtcgtaaatttgcaacagaaaacttgattcagtatgcgttggagtgggagcgtgaaggaacagtccccgagcatgtcttccacacattctgcaagcataatatgctgttgcccaacatgccagccccattacccgtggactggctgaagcgactgggaatccacgatatcatgggtgtcaaggttgaagactgggactatatctacactggaatttactgtgatgaggtacgccatgagcatcagctatctaactacgctttataattgctaggtaattgaccgatggtttgccaatagatggcccgttccggtctcagtggcccctccggctctctgaatgctggcttcgcttttggaattgcaccaatctataaatttggcagtactgagctgcaagagcggttcttgcctgcgctcctcacaggtaagaagcgaggctgcattgctatcacagagcccgaggctggtagtgatgtcgcaaatatcaccacaacagctgtcaagagttccgatggacagcactacatcctgaacggatcaaagaaatggcaagagacaactctacagtaataatagagctatgagctgacaccaataaccaggatcacgaatggtatctggtcggattatgcgaccatggccgtgcgaaccggtggaccaggagccgcgggcctttcggttttggttgtacctctaaagggccaccccggtgtctcaatgcgccgactcaaagtctcaggtcagatcacaggcgggaccacatacattgagctcgacgacgtcaaggttcctgtatcaaacattattggtcaagaaggagacggcatgcgtatcataatgaccaacttcaaccatgagcgacttgttattgccgttggagttactcggcaggctcgtgtggccctttctgcggctttttcatactgcctcaagcgtgaggcttttggaaagacactcatggaccaacccgtggtccgccaccgtctagctaaggcaggcgccgagctggaatccatgtgggcgtggattgagcagatcttgtaccaattggtccatctcagcaaagaggaaggtgaccgccaacttggtggtttgacggccctggctaaagcaaagtctgctatggttttgaatgagtgtgcccaaacagccgtgttgttgtttggggggagtggatttaccaaatctggtcagggtgaattggtcgaaggtatgttcgccggagtattggtatgtacttggaacaagctaactatgcctctagccattcttcgcgatgttcctggtgcccgtattccgggtggatcagaagatgtgctgcttgatttgtctgtgcgtcaattggtcaagctctatcaggctgaagagaagaagttgtcaccagacgccaagatttgatctaatcatacatcaacaattttggagtgtcaactactcggactttttcgcataatatactcgaacttgaatttatgtcattacacagtactgagcaagaaagctagattgtcatttgcactgacatctagagcaactatgcaataagaatagcaaccatcaaccaatactttccttaacagcaagatcgggattaatctttaactcgtcgtttcaatttggactttgatacccgtaaacaactgctcggtggcaattcccacttgcgggcgacaggtttcttcttgctcattaaatctttcagcagggggtacttcttcgccactgacgccactgacaaatttcgtggacattctccgtcaatagtttggtcttcataagccccttgctccaagagtagcgctatcaaggcctcattgatcacatattgcttcacagctttcatttgatttcgggttctcaaaagcttccaaataattttgtttccgggtttaccacggcaacgagtactcgctcctggtttgaaaacaagtttaaagatgtccggattctcaaatttggcacctagtggtctcactcccttatggtttcgtagattaacatcggcgccagacgccaggagcaatcgtacggactcctttgggacttttgggactttctcaatcctagggtctgcttgatggcctagagcaatgtgaaggggagtgtttccttgcgaatcctgtgtgtttggatcagcaccagacgccaagagcaatcttacgaactctgtttgggcttccaaatctccatagaatgcgtaacagcctaaggcaacgtgaagtggagtgtctccgtccaaatcttgtgcgtctaaatcagcgccagaatcgaggcatagactgaacaactccttcgtcgatttccattggcctctaggaatattgtgtaggccagtcgataagttgaaactgaattggaaatttggatttgccccgtgagctagtagtaacttgaccacagcaatagcctcatcatcttccttgtattcccaggattgctgccaggattgccgcccagatttgttataatttgggtacccacgtgccagagcacattgtagaggagaaatacccctcatcgtgtccgcaatttctacctgggcgccatgctggaggagaagtctgctcatgttgtagtctcctagagccgcagcatatcccaaggcggagatatctgttccgatgttgacttgggccccattgcgcagaagaagctccacaatgttcgtacgaccgaaaccgatagcaaggagcaaaggtgtgttggtcagggtataccggggctttattgggatgttcaagtctaggctgttgcgcgatataatgtgctggatattcgattcatatcccctttgtaacagccatcgcagtacatcatttctagtacgtgtgtcttgcttgtaaatggcatgaatcacagcatcatggatcatgcgattgcatcgtagaagtgaaaatatgtatctgtaccatggcagatatgaagcaacaagacagattacttcggagggtaaggagccaagagacatcttgaatgaaactggaactcagtccacacacaacaagtaggacaattgacggaacataagtagttgaggagttacatatcgtgatcatcaattcagttaacccatgtttagccctaaagtttctggagatgatgagcctactatgactcaatgagatacttgtataggtatacttaaccacttattaatcgtctgttgatatctgcttaacacttagtgcatagtggttcttgaacagcatttcctgctcgtttagtaggcgtcctaagtggttaccttctgcacgcattgacgtggccatcaatcatacatacaagtctaacttccaaatctaccttggaatgaagattcagaaaaagtgtatcttatcccatttcgattattgctctttggagagagtatgcactattataacatcaaggcctctgttatcactttacctctctcacttcggtagcacaagaccccggatactgggcatttgggtgaatctggctgttaagaaattggtctaattaaactggtcgtctgggttaataagtaatattaaacattccatcaatagatacaaacttctcaatgttccaaccagcttaattagaaaatgtagctgacgacgcaaaactgcatcatgctttaccccttttagatagccacggctttagagcagaaaatagtccagcaccaggaaggtcaagaggacactggccagagtcatccgtgtagtctggacagacaccgtattcaagaaccaatttgatcatagcatccatctcactgaagtcaggaaacggttcccactcactcaaatcctccaaatcttccgtatcctccaaatcttccgtatcctccaaatcttccgtatcctccaaatcctccaaatacttcaggaagcgctgaagctcgtcggttcttgggtcaaaccaggtggttagcccattccgtatgaggaaattcaggagctgagctccttcttcgccgtggcattggactttggcgcccgcatcgaggagaggctttgctaggtttatgttccatgggaacgacactgcatgaatcaatggcgtactcgattcgtggtctttcaagtggacgtcggctcctcggctcaggagcaacctgaggaatccttcttgtgtcatatcatcacggaatacatgtttgataacgaggtgaaggcaacccccttcctcacaccacaaggagttcacgtctactccgtacttaaggaccaagtgaagatcctcaagtttttctcgaagtatagcgttttcaagcaaaactgtgagctcgtcggggaaaaatttagctccgtgagctataagcaatttcgcaaaggcttcagatcctcgggcgtcgcggtattgggtcctgaaaacacgagatatgaccgacgcccccacatcatccattgcgtgtacatcagcgccaagatgtagcagatactctatgacaccatcatcaagagacccgtaatacagtactgcatcatgaaggagaggggcctcgttcacattggcgccatataaatgcagcacctccaccactgacctgaaatcgtagttgaaggctacttcaggtacgtcgggtgactggagctcacgcttgttgtagcgaccagcctctacccaagccagtaggcccccgtgtcggatagcacgagacagagtgatttgatctcttatcttcgcgcctttttgaaggaggaaaagggtcataaccgcattcccccgccccaccgccacttccaagggggtgtagggcatggtgtcccagggagggtagtcgttgctgaggtaattcacatcggctccatgtttcaaaaggagatctaccatacccaggttatcatcctcgatagccaagactagagctgattttgcttccaatcctatgattaggctccatcttccctcgtatgtcaagcctcggttcagatctactttccaggacaatagatgacgcatcccttgcatagcaccattcattgcacaccaatataaggcaagttcccctggatctgtatcaaggtttcgcttgtaaagatcacgaattaggagatcgtgaagatctctgttggtgcacatcaagccaagcacatctttacacggtagctctgacactatcatgtttatgatttcgagtggtaacgaaaggaggggcattttgaaggtcagtggccgggagcaaactgggcgattgaggatatgaggttgagaggatgataaataaacaaaacacgcgttgggactttatttcatgcacatatccgtgacctatgtgatttttctaactctcatactggataactaatatattgagtgagatctgaatacctgaacttggcctggcagcaaattaagcataattacctgaattagttaattaccattacagagagagtgtaaacctggaaaaattcatgaatttgtatgcccaaagtgtatatagggtcgtcgggccgggttattccgtgctgtaaatagatgccggaaagcgatctacattcaggcactcaggcattcaggcattcaggcattcaggccctagttatgagtatccaatgagagatatgcctggcatactcttgcttatctccaccgtccacacatgtatttactatgcaagacatctctgtatatgtactccatatatagctatatatatgaccttcttctagtaacatttggagtttaaatgatcgatttagcttatgtttcctctggttgtgttaagccaaagttgagcttaccgaatatagcctagctcgatatcgggatgacgaaagacactggcgcctggctggattcgagggtgcgcctcttttgctgtacaaacaacggacatctactctaattacaacttcagatacacaaaaatggtgaacgtcgcattgatcggtggtactggtatggtggtaagtgtaaatcctgcaagcaaagctcctcgatttactggtctcgaaattccccaagccgagcatacccaggctagaacttcagctaaattgcataaccgatagggctctcaaatcctcaccagccttattgccaatcctgttgtaactcgtgtggacaccatctctcgccgtaccccgtcagtcactagcggcgcgcccccagccaaactcaccaactttgtctctagcgataccgccacctggtcaagccagctctcctccctaagcccgacccccagcatcttcttttccgcgtttggaaccacaaaagcagccgcaggcgggttcgataaccaatacaaaatcgagcatgggttgaacgtcgagctggccaaggccgcccacgacgctggcaccaaggtctacgtactgatctccgctaccggcgccaacaaggattcgaactttgcctacccccgcatgaagggcgaaatcgaggaggatatcaagaagcttggctttgagcgcatggtcattctgcgtcctgggctgattgctggtactcgtgaggaaagccggccgtttgaggctggagttcggttcattgcgaattgggctggcaagctgaattccggcctcaaagatggatgggcccaggacgcggatgttattggcaaagctgctgtcaatgctggtcttaaggcactagaaggtgatgttcccgagggcagtgagaaggtttggaccttgtttggcaatgatatcatcaaatatggcaaggaaggctcgtcttaaacgcattgatgcgttcgaataagctatgtatatgcaattattatccgtatggtttgagatttatcacgttatgcggctatgaacaaattgtctggaaccaattacttgatggcattgatcgaaactcaatatgactttattttagaaatgctgacctccctgcataacatgatcatttatcgcctgcggtactataaacaaagaaagcattcaatctcggtatgaaacatgagtcccatcctccttcacatgaatactacgagccttatttggcgtcccgcgggagctggaaaccccacgatcctgattccgaacaggtccgtcctcctccttggtcctccaagcgctggcatccctattggctgggctcatatccagcggactcttcttgccttcttgcctgctttccttttcattggccgcgagttcgctctccggtgctgtgttcgtcgggtcgaatgaagaaggatgtttggccacttcgccgtccgtaccagatttggcagtctctgagcgctccgggttcaaggtttctcggtcgagcgggccctgacccttttcgatctgggaaatcggggttgtgctaaagggcgttcttgttgctgtcggggtggcgagggattgaatagtaggtttggggacctggctccgggtggcttgctggccggctgagataatggttttccacattctgtgagataggaatatatctggagatgttttcaggtgcagattgtagtggttcgtacagatatctcgttgtggttgagcttgggtatcgaaattgcaagatgtatgttgtagtgaagtgaatgagagggaaggaacttgttagataaaatttcttgttaactattaggggaagtccattacaagtagtctgtcactcttctctgtgttccaagttctctagaccctaggatcatattgacgtcacttggtcagaaacagtcaggctaacccaatatggtaatgagcttgcccttgccctaagtgaccggcttgataatggtatcacaaggcctttgggggttttagcactgagttgcgcgagatttatatattaattcactcaaatctatgtccggatttgcataatatatgccacagtcagaaatgttctatcatatgagcagactggattatggctgaagcagtagtgaccaagactgcacacaatattgaacccgccatgagaactgtcttcggccactaataactaatatactaccggtcgaacttcacacaatgtagctccaggtcatattttgacgactggcggtccacgagccggtcagaaatcgccaaatgatgtatggcgaggtgacgctgctagtttataacgttctagtaataggcagaggcgccgtagaggggcgtcaagtactcgaggcggacgaactggctcgggattgaagcgtgcccagactcgtcaggatattaggacaagatccatcggtcttgtgtccatccaccaataccatcgaggtgtcagggtggcctagcgcaaatataatctagggtaactcatatcgaacctgaatggaaaatccgaaattccattagccaattagcaatgattacgaggtagaagggtctttggatattacatccaacgtaggttctagtaagtgatggtagagaaaaaggaaaaaaggaaagagaccctagaatctgatttagtgctgtcttcttgatgtgtaccacaggtcgagcatttacacatgggaggaatttcacgacaactgggaacacgtcaatgtgagggcccactcagagaagtacgatctaccaatgatggctagtcgtaggcctcactcaaggcgagtgctgatgagatgcacatgcctctttggtgcaggacgggtgggggaaagtctcactagttgcatacaactgacatcccggctgacggttgccattggatgattgggccggctgcaggtgaggataagtcgatcggtcgaccaatccccgtacgctcaaggaaatgtagacagtgggctttttactgtccagcaccagaggtataattaccatcaacgatttgtcgccagttaaaggcaggcgtgtgtagggtgcgggaacctccgttcactatcagatcacgggatcagaaaaacccgacgctgtgggagcctatatgcgggtcctagaattcaattctaacgttgaggcacgggcttcctagttgatagcactcaaaattgtctgcggtggctctgactagataaaaacacgatctagtatttcactgggcaacttcgcctgttgggcagaaacgacaaccatgctttgcccacacccacggcctgatccttgcgaggagatttcggtggtaagacggagcgagagggaaaagagcaggggggcaatagaaggtgattcgagggcttcttggggctggatgcaatgagcttgccgcagcaaagtattgatccaccgggtgtgacggccattttgaggctgtgagccatcatctaggatgccagttgccaactcaacatcttgtcatggatcatcttcctaggtccgattctgggcgtaattgagcggcatttgccgacgatcacttgtcgtactggtgtattgtccagaacaatcggccaaaacagcaagcacagaattctgcaggattttccatttcatattggcaatctgtcatatttcgtcattgcaaataacgtgaatggcatctgggtcctcggtggagcttgcagagaatcctaaacggcgatccacggccttcgacccagccttcgctactaggaattggtgcagaaagccagaaacaacgtgccacgtcagagtctctgggctttggtgcagctgcatatggttcagtaatatgtggaatgtatcacggttcgtctgcggcgagcgccgtacatcaatccgatcctatcatttccgccataagagcaagtgggtgatgatgaacacacatatgagcgggggcaaatgcatgatccctctttgcaggagtgagagatcagctgaacgaaaatagatctatctggcctgcatccctgatttcggaggtgtggcacaagaactttcaattgcgtgttccgtgtccttaaacccgagtgccaatgatagagcctcagagactctagcactgccaattaagtgagtgctattggctgacagacacggaccggaaaggcgcagcaggggtcgaaagacggccgagtctgaattttgatagactggcgattaaggctcggcaggaataacacaaggtgacaggggttaatggttgcaaccacatgctgagacccaacatggattaccatcattgcccaaatgcaggaaacgtaagagccacgaggaggaatgaaggcaataattcgggatgtgcatgcatctgcaatcacacagacagcaatatcggatagatacttctgtggataaacatggcgttcggtcagaatcccgtgtcggtgctcatgatagatgaggtaatgagccaatcaataatggcagctatcaaaaaatcgcttcaggatagaacaacccattggggtggagtcacaagtggcgtgcagagtcccgtcatattcgcgaaggcagtagcttttctgttgcatagagacagggttatccctgggcatgaaagcctgattattgcatcaatacgacatctggcaaatgccgggaccgactcggccatgcaggagtagccatgcaaaacgcaagagaatcacaagcgtcgagtccatgcgaacagcatccacatgaaagcggggagaggcagatggcgacagcataattgcagtagtcgaatctggaaactagagtattgcagccatgaattgagggattttcggcccatcgtacatcatcgccatgaggcgggaatcgccacggctgatggttgcatgcatccatgaagcaaccgattgttcacggtggctccattcgagatgcaatggccatcataccgtctccactgcttggagaactgctcacagccaaccggatcaaccgtcaggcaggtgcgatgtgaaatccacggactggaaccacggatgataagccatcgggcactgagaaacgtcgatcaacagtgggacgaggcaaacatgggagaatagagtcgtggcatacaaacttcgaaacataaataagcctgtcaacgcccctatgatgctgtgaagttcacaatcatccctccggtttcacaattcgagtctgaaatcttcaagccagtccaatagatcttcctcataaaaagaattcattcgaaatttgtttcaactttgttgagcttctcgggtcctttcaaaacacagacaaaggtcggcctatcaaatccgacaagctcgggtgctgtcaggtgcaaccaatagcagcccgcattcaagctgaaacaaagacggagagccgtgagcaagtgagttatgttgtacttgcagtttgagcagcactgacagatctaataggcatgtgcttttacaaccaaaagagatttgcgtgtggagactggagctggaccagctttgcccaccgatgcaactatgaatatcgcaccggcgagacatgcggtatgagactcgtcaacatcactgagaatgagaagaccaattgtcgtctctgcgaaaaaatcgagaccaaaaatcgccggcgtagtgccgaagtcgaccgtttggaccggtggaagcgagagggtgccacacttgtggcttccattgatcggtctcacaaactcattatggacttggataaagagatccgcgccctgcagcgggagcgggacgaacgaaggagcactctcctaagatagggttggcttggatttgtaaaaccggtattcctttggttaatttttcttttttcctctttcccttttggacaggtgaataacaatgtcttgacttttgtgtcgggtccttcgtgggccaattgtcctatcgttttcttgttgcctgtcactgtttctttagggggatgcagcgaatttcatgtttcaccatttgtccgcgacattaagtccaaatcgagtttctgcaaggtgatgggaaagccgtatcgcctttgaaaagattgaggagaaatttaattggttcaaactccgtattggtttttgttgataggctgttaagctcccaaaaaagaatgtcaatagggactagcccagtcataagcgccctttctcctgggtgagcggttcgctgagacagatcgagtctcacaggacaaggagtggaacctgctgcagctagacaaaaaagacatcgaggcctgacaaatatcaaatggccattcataatcgaccagtccttgaaggaagagcaatggtacctggtgtcagagcgagtgcacatagtgggacaaaatgcccctcacaacacatgcccgcacgtgatgaccacctgcttagataacctaatagaatgaacctgtcaagaagatatcttagtggcaccatagaaaagaggcgaatgaaagtggaagtggttctgctggttaggagtgttgtgagaagaatccagggctagctgggctaaataggttccacttcccttgctctatgccgtggataactccgacattgcgaaatcaatccagctctaaaacgatagctttgggcgatctaagtaaaataatgacaagtttagtaggtataactgaaattgaaatcgataaaagtaaaaagtgaatgcggtagtgaactgaaggctacaaaccagcaagttggggaactatatatcacggcactataatcggagaatttacttctacatgccactaagcaacacccgtgcttcttcagcctacgtgtacctatctgcttcaatatcttcaaagcacaaagcgtcaaattggaatgcagaactgaaggagagcgctgagactaggccgatgtgcatgccacgtcacaagagaacagcaccaaatgcagccataaacaaaagcccacacgacagataaaagatcaatgttttgtttggacatgaggtgatgctatgatattgcaaccgaatgattatggtcaaactattggattcgagtacctgaaacggaaaaagaacaagagaagatttaatctattttatgtcaccagcctcgggctcatcatcgaccttggccagcccttgttcccggagaagggaatcaatctcatctgcagtccataggtggtggtagatcttgccatccttggtcttgcccactgttgcaaactcgactgcgtaaggtagaaatgttaggacgaaaacacaatacagaaatgaccgtagaactcactcttctcgctgctcagctttgtggagtccatagtcttgctcagcaccttgacagccatagcacacgcctccttcagattgcagtcctccttgtaatcttgcttgaggagactctgcgcacttgcgttgtttgcgccaacgctcgtcgctttccagcctccgtaatttccactggggttactctggtacaactggaattgacggagatggtcatacccagcgtagatgaaggagacaccaaacggacggagacctccgtgttgggtatatccttgcttcagatcacacaatcgacggacaagttgttcgcatggaatgtcttcgttgtacgtgaggaggtagcgttgggcgttctggcgagcatagttgatcagaatgttggcatcggcgttcatacccgcaacagcgcagatcatgttactggaaatcatcagctacttatctcaatactaaacacagcaaatctggctattttatttgagacaaaggtagtgttggcgtactcgttgattgtgtagagcttctcagcggaggtatcctgctccagcagcttgctggtcaccttcctctcagcagcgaggacaataccatccttggctaagacaccaagggctgtgccagcgtgagaaatagcctcaagcgcatattcaacctggtagagtcgaccctctggggagaagatggtggtctttccaaaatcgtcataggttagctggagctgcacaagaggaatgacggtgtgcacaaaccctcgaatcgtatctccgagacatcgtgtatgaataaaagaaagcgaaaaaaactcaaaatgggctaaaggtgagggttgattgtgcgagacaggtggttcgggatggtgaaggtcgatggtgaagacgtagaagctccaggcaactcgccctggcgcgtcctctgtcatccgccaagctcggaccacttcaccacaccaaagcttcgttgcgacgatttcaccaccttgacccgcaagtacggattacaagaccgatttgcccattactttgcattttaaattgattcatatcgattgctatgctcagatcaacatacaccgctccacctcctttgccatcggggtggacacaacatcgagcccccacaggttggtcttgcgctgggttcgagtgaaaggtcttggttctgactattaagccaggtcatttgtactattacaattcttccacaaaacaatcgacatatacccggcctcaagaaacagctcctcagaccattcaggctgctccagacaccccagaagcaacatacaatccagagacgctacctccgttttcttcaacaccatatggaccaatagggtttgcctcggggccggcgcaatttagtccaccccagaactcccgcggccgcggaggattccgcggtggnnnnnnnnnnnnnnnnnnnnnnnnnnnnnnnnnnnnnnnnnnnnnnnnnnnnnnnnnnnnnnnnnnnnnnnnnnnnnnnnnnnnnnnnnnnnnnnnnnnnnnnnnnnnnnnnnnnnnnnnnnnnnnnnnnnnnnnnnnnnnnnnnnnnnnnnnnnnnnnnnnnnnnnnnnnnnnnnnnnnnnnnnnagccccccccggagcccccgcggccggggaggattccgcggtgggagaggttatcatgatcatggacggagagaaaccgaagatcgaccaagagcgaagcatcctattcccgactgcgccccgtggctactagtaaagaccaagcttgggaggagatttgtgcacaatccggaaacaaacgaaagtttttggaaatttccagagcaagttttgaagggtgtggttgaatttgatcgcctcgagcgtgagaaaaaggaaaggaaagaacggggtgagcccgaggtaccagccaaaaaggaaccgccttcaccacagcatggtcgtatagagcctgagccgataccgcaagaggcggaacgtgcagattatgactccgactatgaagaggtcgaggttacagacagcgagggagaagagggccaaccgtcgaagcgtgcacgagctgaaagtgagggtgtcaaggatcagccgctagagttcaacgaagaagacatggcatatcaactagcagccatgggtgaagattacggactagaccccggggaatatggcgaggtcggagaagaagattgggaagagggtgcagagggcctgccgctgaccgaagccgatgccgaggccctcttccgcgacttgctggatgacttccgaatcaatccattcacgacatgggagaatgtcatcgaagaaggccgcatcattgaagatacccggtataccgcaccctcgaacatgaagacacgacgagagatattttccaattggacccgggacagaatccaagatgtgagagagcagaaagcgaagcaggaaaagaccgacccgcgcattagatatctcgcatttttgcaagaacacgccactccaaagctttactggccagagttcaagcgcaagtacaggaaagagcctgaaatgaaggactctcagcttggagacaaagagcgcgagaagttctaccgggaccacatctcgcgtctcaagcagcccgaaagcactcgcaagtcagacttatcagccctgctcaaatctgttcccttggacttgttgcatcggtcatcgaacttggaagccctgccaaccattatcatcaccgatattcgttatatcggactcgcgcccgaggttcgaaatccgttgattgaggcatacatatctactctgcctccagcgccggaggtacagatgacggcagaagagttagaagaagtcgaccgaaaacgaattgaacgggagaaacgcgagagggctcttgcagatcgggagaagcgggtggaggaagagaaacggaggcagcgaggagatcttctccgtagcaagcatcttctccgagaaggcgaagccgagattgaacaggcaatgcatgtcaacaaggacggactaatgagctacatggacattgatcaggcagtagacgaggaacagaagccgagtcaataatagttggtcactgaatattacatatcacttttgtcgagataaggacagtcgtgttcatattgtacatcaagaggcaatttgattataccaatgccatccggttcctgagggtatcactgtagatgagggaaatcatttcccttcacgtaaacgattcatcattccaccatcgatccgatcatttaaatctccaatcatcccaatcctcgtcgtcatcgtcttcactctcgctctcaacctgctccactgcgccagatcctatcggctcatcttgtgtcttgtcttcggcgcgggatttccgcagctcctcgcgtttgtgtttgagccttcgcacccgctcttccagctgatccatctcatcaaactcttcctctaaaagccgtgcggcatcctctcgctccccttccatctctgcctcacgagtgcgggctgtcgacgtcttcgatctctcttgttgtgcagcgagttctgcagccgtcactggcgctgcggatattgtggcctcagctgtaagagcggctggtacatggggctcatcggactgggcggcgacctcgcgttcaaatgctgcccatgcctcttcgtcaataggcgtggatggatcttcgcgggggcgcgtagttggttcttctgcaaggtctgcagctgactcaacaacctcttgttcgttgtcgagtggaggttctgggccagcgacatcatcctcaacttgctccgaaccttcatcctctgtagtgtgctcaatgcttgctgcgccagaggcagactggaatgtatcttgttccgcagcgcgaagcttctttcgcattactccatctccactatcaaccttgcgctttttggtgacccggtttcctgtcgtatttggctgagatgtgcccttgcgggaagctaattcactgcggagtagggatcggacgtcggccatattcttcaatttgtaaggataagagatatgttatggtaggtgaaataagttcagaaacaaactggcggaaacagaagagcctgtgatgaagagtggggaatctggagaagctcaatcttaagattcaccgaagggcatttcgccgcgaacctgtggctggtgacaaatagcacgtgatgacgcatccagtgaatgacaaagacgggagccaagccacttattcatctctcttcttctcctcacatcgcatcggatctcttttctatctaacatctttcaaccatcctttggcgttattgctttcgccacttgatcttcgagcatttctgctccaatctcaactcaaaccgtctagccctatttttgactgcaaagtgcgtgatttgggctcaaatcactccacgcgaccccgcttagcgccaagtgtcgatttgacgcgcagcaagggattgcacagtccaccataacacctgcttgagcgcgttctttgtcaccgcgcgtcaatccaagaaatattgcgcagagactagatcggttcttttattcgatcgagcaaaagtgtgggctagacagtgacgctgttgtgctgtcttcttgtgtattacattagcgccttgagctcgtagagacttttgtcagcctggggtaacacctgaatttcgagcaagtgaagagacctatttcctgccacgcgctgtagtacgcgcgtcaaatcaccattatcatggccggtaagctttcgtacaccaccactacacacattgctatccgatcacttttgagtggcagggcaaccccaggtctgggttgcgactatttaccagaagacaagctaacagtgagattagatgaaccccgacgctccggccgagccaccaaaggccaacacaagaaccttgaactgccagatgatcacgcaaaaaaaggcaaaagcaaaagcccgaaagaaaagagcgccaagttgtccgccgaacccacacccggtcctagcgaagctgggggagacgaagaagagattatccgatgtatctgtggtgaatatgaagaggaagaggatgtggagcgtgatatgatttgctgtgatcaatgctcagcatggcaacacaatgactgcatgggtctcacattcgtgaaaggtcaagaaccagatcaatactactgcgaacaatgtcgaccagagaatcacacaaccctcttggccaagatcaacgcgggcgagaaaccctgggaagagcttgccgagaaacgtcgccaagaggccgaggagaagaagtccaaacggaaaaagggcaagaaaggaggccgcaaaggaagacccagtgagagccggacggatgccagcacaccagctcgcactgcgccatccactacaccaggccctagcggttctcctgcacccgctgtgtccgccgtgcctgcctcagccgaaccggagaaaaatggccatgctgttgattctcggcgatccagcactaacaagcgcaaacttgatgaggcaatggaggcagaaaacgtaaatacccccatcccacccaatcatcacattcaaaatgttaacttgcttatttatcagggaccacaggtgaaacagcaacgggtatccccacagtctacaccggcagctatcccagaggcaacggcaacccgaatcaagacagacactatccccgaggcgcgtgccattggagccctggaggagttgatgcctgcccgcaagagtgtggccgcacacctcatcaagttgtttgtagaccagattactgcggcactgaaagctggttcttttaccttgcatgcgaaccagtcagtggaggacatggcacagcaactggctctatccattgaggatgccacgtatgagagtatctgcggacggtcaggcgagccgaatgaatcatataaggcgcaattacggtcgatcatattcaatgtaaagaagaatacttctctgcgagatcgtctgctcataggtagtctgtcccctaagttgctgtctcagatgacatcggcggagatggctagcgaagaactgcagcagaaggacgctgagatcaagcgagaagcggacagacatcacaccattattcaggaacaaggccctcggattcgacgcactcataaaggagaagagttgatcgaggatgaacaccatggcgcgaacgagtctattttctcccgcggaccccgtcgcgctgtgggggatgacggcagtccaacccacaaaagccctaccagccccatggggccacatcgatcaaagacagagatagatggatacgttcgtggtctatcacccgagggtgctcaccatgaccacgtcttccctgaagtggctcccgccatctacgagccagtgcctagtggcagggtccaagcagatgctgagatcgatcagctcttgcgcgacgatgaaccctattcacctccttattcgcctaaagacttcgacgacgacggcaccatctggcgcggtaaagtaacgatgcctccaatcggggagttctcctcgtccgcgaagcatgtgggaggcgcggacttgagtggccgaatcccatggagtcaactggcgcccgccaccttggttgttgatggtcgtatcgatatcagacgagcaactgactatctatgtggccttcagttcagcaagtctaccgatgtgtctgtgatagcaattagcagtcctgatcagcccacggatcgagcaggcttcgacaaaatgtttgactacttccatagtcgtggccgttatggcgtcattggaaagcatccgctgtccgctgttaaagacacctacattgtcccaatggagatcggcaccacaacgatgcccgagttcattgagctgctggaaaacatctcactggaagtccccattactcaacgcatacttcttaccattttcgttgtcaagaccggcgaatccaacccttcatctgtccagccgccatcccaccaggctagccaagagccacctgtctctgggagcccctcagtcgcggcgactcctcagcagcctcagttcagcgctggaactgcaccaactcctccctcccacttcggtggcttcaactcgaatcccgcaacgtacgtccagcaggcccctgcacagcaaggccagctcacccctcaacaccagcctgctctaaccggcctccccgccgcggtgcaagtcctcggctcacaagttgatgcccccgccatccaacaacttctcaagactgcgcctaacgtggacatggcgcagcttagtgtcgttcgcgacattctggctcgccaacctgctgccgctgctcattacgatactttgatgcaggctctatttgagacccaagcaaacggccatgtgcctcagcagggtgtgtaatagagctattcatttccatgatagccatttttttcctgtacagtttatcccattttgtatttccttttacaaggctgcgcaatgctagtcaggtgttcaggtgaaatctccagggctgggaaacgggtttgttttaggaaagtggaatacccaccgccaaatgttttcgaattttatgctggttctttactcgcaaaaatggaaccgattctagttagtatcttatacggcttgtttagccctgggtttattgtaggcagattgtaatcatgcactggtaaagttctgcatttgtagtcactaggttccattctatcactagtgatatgtattatttctctattatgacacagattgagatattccatcctatcaggtggaaagataatatattatacacgatttcttgtacatctttcagtgttgtgagatatcgacaagaagcagaagaatgaaaaatgaaatggatattgagcacttatcctatgacctccctaaccgtcgtttgagcatcatacacgagataataagtaaaaacgcctgcgctatgcaacgggtccccaagctttcaagaacgacgtgaagtcaacgaaaatcaccatccttcaccatctttcaccatcttccacctccgcggcgccgatatccaccgccgccgccaccaccaccaccgccatatcgaggaccccgaccagcaccgggacgaccgccagaggtgtaagggttatcatcttcttcatgatgacgaattggtggagcccggcctttcagctcgatgctcagcttcttgcagttcttgcgcatgtctgagtaccccatgtgcatttttccgaaaaagtgatccgccagccggcggtcgttgtcaagacgagacaagtaagctccgcaaacgtcacatacttgtagcttctggtggccggatggcccagaggtatcttgaaggttcttgagatcgcgctccagactctccttctggtgcttggaggtgcggactttgtgcatttcactgagtgctagtgcgacagagcctgtttcgccgagaatcgagacttcttggagaccggagttgatggtgttggaaaggtcggcaatttgtttaagctatataagaagttagtgaactccaacggagtccatctgattggagattgaagattgaagtaaatttatacataccaggtcgttcgtctgccgaatctcatccggcgtcttttccagtcggcgctgcgcagtgtcgattcggcggtcacagtcgtcaatgtacttctgcatgtcgcgcaagtaatcgaattcgaacccccatttcgccttctctgacgcagacgcagtgtcatattctgtcttcaagccttcactatggaccttggggcaaattccgagatcttgcttggtgtttgtgaacaggtcgtgcgggcaggtgccaacaatgtaagaacggcaaactttgctgtctgtgattgcgagctgggaattgcgaccctgtgtgccagttccagtgagctgatcagctatagacagaagcaatgttagctcaacttaaagagacttgttgggggtggccagagctcggaaattttgagagtcacaaaaggagcaacatacctcccatgagctgctcaagcagctttctctgttctgctgccatgctgacggtgtctgcactaagctggaaaggaaatgaaagacgaaattgtgtcaacgggctgattggcggcaaacgacgaagtcttttgctttggatgcttttggcgccaaggaaggcggtgaggctccgctgtcaacagcatctcggggattttggagtttggcttcgatctttctttcgatgtggagcttttatattgacttggcgattactgaggtctgattttctggggccatagtcaattaggctcatcgcttcaccgagaccccctgccaattgaccagtgacaaccgcatggacgaagaccgagctccggcaagcatgaagtcatgacggtcctttcactattctcacttccttttgtcgcgcttattctctcattatggagctcctctgcctttgcgtcatcggactatcatgagcacctcctccttcaacctctcccgcagtcctccttgctagcttcttttaacttccgaagtaatacgtcgcaacaatcattcgaccaacagcattttagatatttgcctcgcgcgcttggtcagattctccaacacgcccacacaaaagaattacacctccgcttcaccaccggcagatgggacgctgaaagctggggcacacgaccatggaacggcagtaaagaaggaggcactggcgtcgagctttgggcgtggattgatgcgccggatgatgaagagtatgctcctcactcgaaatatgttataaaagacacacaatgctgattgactagggcttttgccaaatggatcactctgacacagtccctctctggtctattctgcgcctcactgaacttcgtggactcgacccggaccactcgacctgttgtttcttttgaaccggctggggatcactcagctgctgatcagctgcaccttttgcatggaacgcttcctggagaggtagtttgcacagagaatttgactcctttcttgaagctgcttccttgcaaaggcaaggctggaatctcttcactatttgatgggcacaaactgttcgatgccgcgtggcagagtatgtccgtcgatatccagccagtctgttctgcagatggagaatgtgtggttcagatcgagcaaaccgtggacatggtcttggatattgatcgctccaagcgctctcgttgtgcgtacttttcaccggcatactctgcctcaagattgctaacatggatctagcgaacccaattcctcggcctgtgcctaatgagcagctggtttgcgacacttccaagccctataattcggatgatacctgctatccggtggagaagacaagcgagaaggcatggagtcttgcggaaatttttgggcgaagcctaaatggtgtttgtcctctcacagatttcgatgggtctagcgaccagagtgtctgccttcgagtgccccacgaacggggtgtcttcatatccgaggaggccaatgaaatcaagaaagatgatggctttacacgctgtttcaaattggcgccctcggttccctttgatctttcgatcccgcagcagccagccaacactgaagttccattggacgagcctgttttgcatgcggagcgaactatcgttggccacggccaggagcgcggtggaatgcgcattatctttggcaatccatccaacaccagcgcagttgactttatctacttcgaatctcttccgtggttcctgcgaccatatatacacactttgcatgcaacaatcacaggacacgatggagtcttgcgtgaggtcccagcctctgaaatcgtcaaagaaacgtactaccggcctgctattgatcgcgagcgcggaacacaattagaactggcgctgtcagtccccgcagcatcaactgtcacgctgacttacgatttcgagaaggccattcttcggtacaccgagtacccgcctgatgctaatcgagggttcaacgttgcacctgcggtaattcggatcttggatacggcccataatgtgccgatctacattcgttcaacaagtctgctgcttcaacttccaaccccggatttcagcatgccgtacaatgtgatcattcttactagtactgttattgcacttgcttttggaactatcttcaacatcctggttcgacgagttgtctctctagatgaggctgccgctctcggagcccagaccctcaaaggccggatactggggaaattggtggccattcgtgatcgactccgcggcaaggataccaaaatggattagttcttatttgaataagtaatcacaattacaataattagcgggtttaaggccccttaaaagacctgtaaaacgcctagcattagttatatattgcttttcttcacagaacctgaagacctgtggtattgaggccggaaattcccgctgtcactaactttacaatcgatgcacctaggaggttgttcatacaaaactgcctctgacctcattattcgaaatctgatagtacatattaacgcaacacatggccacttggtcacttggttggaccggctcgaccaatgcttgagccagacgcgaatgcttgttggacatgctcttccaaatgcaacacactatcaactcctttccaaaatatggagtcaatccgcagaaggccaagatggaggcaaggcaaaacgtcagccttcaggcgcatatcccggcgcactttgttcagacaagtgacccatttgtctgcctcgttcctatcaatggaggtggcagccatattcagaatttggaaacagatggacgagaatgcagtcgcactccaggccggccataaaacctcgaagtcttccggacgcagctcgtgaatgaactccgctgctgccaaaatgcaggtttctgcccggatccgagcctgctcacgcgccattatatattcggcctcattcaaattttcaacggttggctgcagaaacggcctcaaaatagccctggaaatactcagatgaatataatggtagttcatctcgagtgttctttctagtccgattggtctgccttgattcaatgatctgacatcggtcgatggtacagatactggtctatgccaagagaagagactttcaagcagtggaccggttaatgcgacggtcttgtggttatcagtacacatggtattaatggcacgaggagaactaatattagtgagttgcggaaaacggcgagacagtggacaacggacacggggattgtcttactataattgcgctagaacacgatcaagtattgcgtcgagttccgctcgcttcatgatattcatccaggctagagggtcaagtccactgtcaggttgatcctcttgactaagacttgtcacgagccagttatcatgatgcagtaaaggtggccgaccaaggctcaacgcaagccatttgtctgtcgaataaatgaaatacgacaaacgacgtcgctgcgcaatttgccatggaggtattcgccatgactttggatctaaatgtagtccaagggtatgagcgcaagcaacaagggtggcgagctgggaccatctgaagccactatccaatacaattgggtttggataaggtcgaatggccaaaagaagcattgtctgcacaacacaaagcttcggtgcgtggatctcatatggaagcgctttgttgataatctcgtatagtgccacacctgatggcttatcatacgcgagatcaatgcatagtctttcgtcaaatttagtgaagggctcgactattaggtatacactcgcaaggaggtatggcgggctggtgttggggtttaattggcctggtaaaccaagtatcgggtaatccggtgcgatgattctctcaaataagttaataagtctgagaccgatatctgctgggaccaaagactcgagttcctgcctcaattcaagggtcgaaacgttctcgcatccgttttcttctctgctggcagcaaatattgagggatttgacagtaaaaattgagttggctcgggtcctgaagacacagagtgaatactgagatttttgaaatgagaagccccagatgtgtcgtatcgataacgaccaatcagaaaagggtccatatcaccactactgccgagcaattgtggtgtgattataccctgcgtatcaaggcaaatagatgagccattctcctgcataagcaatggaaggcagtttgcattcgatgaagctccaacttccgaatggccagtccctggaagcccaggtgatggataaataaagctccctggactaaatccagtcggccatgtgccatctccaaagtcacccgataacgatactccagctccattaaagaaatcatgaaacccttcaggtgcagcagcaaccgaatgatttaccccatgatcatcaatcggcatcaagatatcgtagtggactgagtcaccaactggtgaaactgcacgcagatctgagtgtgggcttatctcagtttgctgggtcatctgtgagctaatcgcttcggagaaaggctggcgtggccttgaggtcggttgtagaaacgtgcattctttcccatgaagtgtacaaagataacagggaggtgctcgatcaatgcgacaagctgccttcctagagcgacaggaatcacaagcgcggttccgcttactcatgtacctacgagctctgcctgacatcctttcattgagaaagttgtcatgagcacatagtagattagtggctaaacgagggtttaagagatacgatgtccacacagtcaaatcttagccccacattccacgtgactatatctgggttccaaggttcttgtattaatgtgatttattatcactaaaggtctattcgagtttccatataaatatgattatgctgaataaaaatcttgcactaatactttcaaatctccacactttgcttgtgctctttttaactatcggtacaactattctcggagtcagcttcccgggtctagtcccctgcgaaatattgagttgggtggacaaccttcagccgatgtctgttagacccatcattgggttttcttccactttctaagctcaggcttttgttcttgccccgtaagcgcatgcttcacagtgccaactccccaaggcaggatctcggccgagaaaccgcaggaataaaccctatgcctccgacaaccaagattatgaccacccagtcccttagtacgactacaggaatggattcatgatacgtaggcagaaatatagtagggctgagcaagtttgaagtttcagttttcgtgtggtatgtatgagtcagtcgctgggcacaattcggcgtcctattcttgatgcttgacttgtggtccaagctaacagctgagcaatttaagttgtattattgctaatttgagctctcattataactaaatcaatacccagctcatgcctaattaaatagttaggctgcggttgtgattactagtagttacgtaactaacacgaaatgaaattttaagttatcgtgccgataaccttgtccccgcattgcccgggccgacctcgggaagtaaaagttaaggttgtgataacattcttttattgatatcagtttgcatggagcttagaatttaggggaggaaagaatcgggactttctagaaaaagtcggtatatcctataggcaaaatcatgcaaaaaaaaaaaaaaagagaaaaagaaagatttattagaccaatatatcagggcatcatgctcagtttaagggaacttagagcttgagcaaaataattttttatgtctagttttggcacatactccccagtactattcactcttgccgtagtgcacttgccgaagcatctgactagtgtcttcgatatacacaaagctttgtgagagccccctttcggggtgattgaagtgcccgaatgcatgtggcacgccggggtatctcttcattgtgacatcatttccagcctcttgcataagctgaccatagtactctccttcatcacgctcaagatcaaattctgctgtgatgatgtgtgcttttgcaaggcctttgaatgaaggagcaaggacaggcgtgcatatccactcttttgtcaagattttttcttgggtagctagaaacgaatgagtaaatgtaggaagagggttacaagcgtggaatagagaaagaagacttaccgtcatcgtcgccaagccaatacttcaggaaccattgctctctgcctaatggtccccaaggagaatcatggaatagcaagacacttttgtagggacaagtagactcattcagctcgcgtgttcttagacagtagcgcatatctgtcgccggaactatcattaactgaagttttagctcaatgccctcgtcacgggcgaaatgcgccatcactgcagtcatttgacctccagccgagagacctccgatagaaacactcgagggatcaacattgagcttagaggcattggttattgtctgtccatatatcgtgttagcaaagcaaacatcaaatgatattgtttttgtatttacccatttcacagcatcccatgagtcgtagatgctggtaggatatggaaattccggagccagtcggtagtctacatcaatcactttaatttgcgctttgttgcacatgtgccggcaccaagcagcttcagacttgagattgccaaggacccatccccctggagccaatgaacaacggttagcaaatccacgttagagagcgtaagggtggtatcgtaaattgcgtacctccatggaagttcaaatgaacggggaatggaccagatccttttggcgtatataccctgatcatgatctttccagctggttgagagactgggatctctatgtcctcaacacggaaaacggacggaccttgatcatagtaagtgcttgtttagacgatttaatcaagactctgtcttaccagggcatgttgggtaggtgaagctatacgtggcgggacttttgcgatattcctcaagagatagctcgtcggctctcaccatggagctgccgtgcttttcccatagttctacccattcaggatccaatccacccaagagcttgtctggtatagacaagcgccccttcgtcccttctaccacgaccgatgtctgtgtacctaccacgactgaggtttgtgtactagccattgcgatagggaggttggcaataaagagaaattatgaaggccaaaagatggtaaatggtcaattttaagtgaacgactaaaatgaattaagagatatttgacggtgttgataaatttagtcacttacccttcgatatgccttggatataatgccgggctctggttggcggcatcggccgtattgtcagctccgatctaagcgataggcatcggggtgggggcattcctatctgcgggtccaatgtgggccgtacaccccggattcgttcccgatatcgatccttccactgaccgagttggttaaattgaaacgccgttcctctgatttggcatagggtagagaagagttaatattttgtctcttacacattgcttcacatactgttctaaatatttacattgttcagccgatatggactctgtctcagtcgataaccgaagagactattcagaggaactggacaaagttgaccagtcacctactagtctccatgctggactccgccgtgttcctgacaaattcccacgtgtcgcactattaatccttgtcgtcgaggtaagttgctccaccgcccacgtgttgattgccctagctcgcccgctaacatggacatactagcttggcgaacggttcacttattttggcctcagcggtcctatgcaaaattatatcaagtatgctgtcttttacaaatgagttgatcttttgaaaacaatatctaactccgtttttatctagtaacccctatgatcctggttcagatctccctggcgcactaggcaaaggacaagcaaccgcatcggctcttggaaacttctttaaattttgggcttatgcctccaccattattggcgcgattgttgcaggtaatacatctccccttgagagattgcatcattgttattaatagtccaccagaccaatacgtcggcaaattcaaagccatcacaatctctttgggaatctacatagtcgggttgatcatcttggttgcaaccgcgacaccagctggctttaagagcgatgctggttttggaggcttggttgctgcgatggtcatcattggcctaggaacaggtggaatcaaggccaatgtgactcccatgtgcgcggagcaataccaaaatgtagagccggtgttaaggatactcaaatcaggcgaacgtgtggttgttgatcccgaaatgaccgtgcagcgacttttcatgtggttctactgggttgtcaatgttggcgccctctcccccttgattacagtcaatgttgaggcgaagagctctttctggcttgcatatttgatcccactgatgtaagttgggataagacatatttgtattacacacctgctaatttcctccagtgcaattgttctctcggctatcgtcttcttgtccggccagaaacgatatgttaagattcctcctcaggggtctgctattattgatgcatgcaaggtcttgaacattgctcgacaggagaagaattttgaaaacgcgaagccatcagcactagaggcctcaggacatttgagcaagtatccatttgcatcttcaccgcactacacggatcagtacgtctcagacgtccgtcgaggctttagaagctgcagagtaagttgggatctgatacctcaatactgagttatgcttacacatagtatagatgtttatattcttcccattctattttgtttgctgggtccagatttggaacaatcttatctcgcaagctggacaaatggcgttgcatggaacgccgaacgatctcctgcaaaaccttgacccgatcgccttgtgtatcttcatcccacttcttgactgtgagtattgaatgatgataccgaaataacatccgctaaccaatatatctctagtgggcgtctatccagtctttcgcaagtttaagatcaacttcagcccagtccgtcgaatcttcgccggtttccttcttgtctcaatctccatggtctacgccagtgtgctacagcattacatttataagtccccagcaaacagcatacacgtgtggattcaagccccagcatatatcttggtcgcattctccgaggcctttgttattgttactggattggagcttgccttcacccatgctccgaaaacgtgagtcaactgcccacatagtactatcctactcaaactaaccacaacttatttcagccttcgatcttttatctctgcacttttctggctcatgatcggcattgcggcggcgatctgcatcggtctaagcccagtgtcgcaagatccgtatcttccttggatgtatggatctcttgcaattgtgggcttcgtggcgggatgtgcgttttatctttgcttcaggaagagtgactctcttgatccagtagacccaggattcgtcgaaggagttccagttgaaggaaacgggcagcatgttatacagattgctgactatggcaaacacagtgaagcatagaagttgtctgttcaattaaatagcctatataatcaatctacttccgactattattctaacagccgttttccttacatcacacgttcaagtagatgtttgattcctccagattttagcatctataagcctccgttcattccttcgtccactacttatgtcttcctttttatacactcatctcgacaagttgcaaataataccaacagactgaaatatatactatacgtacagcctagcatttggatcaacattgaacttttctttattcaagttcaatttaatcaattcgataatctagagattgccctaaatacaatcgtggcacttgtggcaagcccagaatttgcgagataggtatatactactcttggtatccaccttccccagtgccatgcctctatcatttcaattcagccgaacttagaatcacgggcgccaatcacaagctatgccgcctatccccacagtttaatgccgccaatcggagcagcccccaatctttcgcctccgagataggcgcttgtttactcgttaacctcatctaaattgaaatcgggattctagacacgagataaccaatatgaaatccaatgagtcaaagtgaagggctcatcagaaattaagaagttcttgttggtgttcagagttaccaggcacgatcgaggtggttgttctaatatcacaagaattatttatatattacatctttacactcttgagacggtttgccagagtgagctactaatagcatagaaatttagaggtgacagtatacttagtagatatatacattccttcatatccctgggagagataatccattggaccatcttatcccctgtgaaacagattgatttggccaggaattatcatgtaaatctgtcaagaaacaaggaaactcacttgccaaaaatgttcttaactgtactccatccaggataagtatcaggggcaccggccttatggttcatgaaactatggtcttcggtaacacaagttggctctccttcggcattcataggtagggcattggactcaagcatgttctcacgctcgataaacttattttgcgcttgcgtcttctgatcactcaaagaaaggaagtcacccattgttgatttgggattgatagcctgtggtatgagagttagggttagttagcatattctgtgaagctgtcccgacaacactcgaccacgtacatctgaatggcccaatccctcattcttgccacctaaccagagcctgtcgccccatccttgtccacctccgacattgttggcgggagtgggctcggcactgctgccaccggcgaccgcagtcgtttggcggttgggggtactatcgctgcccattttgatattgtgaatattctgacctgcatatgaggtcattagcgtaatagatcttagcgagaagcgattcaaacgaagtgataaaataatgagagaagtggatggtataagtcggcgttgtatctggaagtttgtaaactcacgatgtatatgttaaggaaattcggttcaattgtggcttcaatccttgtgattgaaattgtttagctggtggatttgagatgaagttgaatttgtttacttggatttatatacgttccatagccttgacctaatcctcgccacaaccccgcatgaagtcatgatgagtacatatcactctctgtgattggtttaccattgaagtaactacgtatatcgaatacttacatattgtcaaacttgctttcccaaatgctttagtttgccaggtattcttcgcccctttgtttcttagtaccttagaagctgtatatatagatgacttatggcagtattagtgcccgaacctcgatattctcatcaattactttctagttcctttccatgtgtatatggtacatgcatggcatataaataagtgggttctagcatgtattcactgacatttaacgaagaagttataaacattgttggcgcttgaggaaaccagccgtggaagaagctctcccgatgtccacgttataggtttcggaactatatatgaacaacctgcttcatgtttgtcttctctttctctttcctattctcatgattcttactgatgacattatcctttagggagatttgatataatcatctcactacgcatgttcaaacgattaaactattgaactattgaactattgacgatgcgatacctcggttgacaggagatagcctactcgtgttgctttttgtcaaagtatacttggaaggagaacgggccaatcttcatggcgagagccaatacccgcctcatggaaagaagattgtctccaatctgctattccaatccgagaacacctatatcctatcttgtcttgatatgaatacccgggacaatcttttttggaataccgccgcggtcggcaacagaagagtggaaatcgtggacattctactcagaaatcaagggagaaggatctcagggcgttccattcctagtacacacgagccaatcgtgcagttgcttctgtggaatagcgagacctaaatgaagcacacctggaagccgacacaggcctttgggggactaccggcgactaagtatcccactggggcataaccctctcattagtgagaggtgacaattctttttgggaattgtccccctcgaccctgcctgaaatgtcagtaccgccttcctaatcgggtacctcttagaattttgctacagatgtttaaccaaattaggaaggcggtactgaaaatggagtagaggggtaaagaattagccgcagaatatactactgatgtggctagcggatctattaatctattattttggacttgaatcattttatttaacttatatgaatttagaaagccaatgttgccctccagttttcagtgggttgctcattttttgcgaggatgctccagatcataccgaaccaccctgaaagttggccaaacctgcaacaagacagcgccaaccatcatacaacccgcaaagacctgagcatgcaggaactccgaggtatcgagattgaccaaagcacctgcaattggagttccagcaagcgccccgaaagacgatatcccccacatcatgcccaaacgagtccccaagaagcttgaatccggacagaaaatcggatgtgccacaatggaagtcggcgccgtgaccaaaacaccactgagagctccccagtagcatgcccagacaataaacccagccatactggtagccgcaatccaagtgaacatagcaatcgccgacgcgatcacggagaatatcagtatcccaataggttttatatatgcgacaagcagatatggaacgacgcgaccgatgacggacgtgccattgacaatagcaaccatataaaagctaaaatcggtagtggtatgcaccaccgtgcgggcataggaggcgatgtagaaaattggcacgtagtatgcgagcatgacacacgtgagcgagagcgagaacatcataaatgagggctcacggaaggcactccagtcgataagacttcttgcatgtgctctctggcctggttgccgacacaaaatcagacatgctacaacagcaagaaataggctgatgaagccaatgctgcgaactgcccatgcgaatccgactctgggctgcagttggcggaacatgactgggaaaatgacggcccccacgctagacccaattgatgcgcagccgatggcgattgggcgttttgtggtgaaactcgttgatattacgacgagggctgggatgtaggagataccgcctcccattccgacgcagaatccttgcgcgagtagtacctattcttgtcagaaatggttcttccaatgtcagatttcggatgtacctgatagtacgaagtggcgagactggtcatcatcattccgaatacagtcaagaaacttccggatataattagaggacgcaagtatccgatatcaactaatggccccgtagcaagaccaaccattgggattagcgtggcctggatactgcctacccatgagatcgtggatggtgtctcatttggcagaagttctgtttggtaatactcttggaaagagccataggtcgtcagtaggcccctggagacaatattagcttgatacaagcacagtaagtgtgacaacagtgtaaaccaaccaagagttcacaaagacacagaagcccgcaagaacatttaaccatgcatcaaggcccccattgactctttttttcggttgttcgttttcacgttcattgtcaagtgccaagttgtccgatggtaaatgtggttgggcgccatgtgtcttctttgttgaacgcatttcgatatatgtgtgccattatgtatcaaaggaaaacagctatgaccttacagttataaggaagaagaacccttttccctccagcactccactgtggggaaaccggggtttccattagtcaacttcttcgagcggcactgggtagccgagctctaccgatttggttggctgttatgggtttttttatgtgctcgtcggggacctccgaatttctgatcttcccgacatctacggagtatgttgtacttaaccgcactgaatattacttccgcttccggaatatatatcgcctttctctagggctccatgatctaactttgtgcctctattattctctcgcaggactttcttctcggacaatttcttggctgcatgctcctatagtgtcagttgacgcgagactagaccaatcacatccacatccggggtaaaagcctcctacacattggcaatcttcgttctatatgagcaatcgagatcaactatgattcaatcgaaccctttttgtcgtctttgaccttatgaattatgtcactaattttacatcgcatttgccgaatgattcaacgcacaatcacgtcgctcaatgcgctatgtgactttatgctaacccttaaggatttccgttgatgtactccgtgaccgttatatcaccccgatctggagagacattggctattcatggttgtgatccattgctcaatcacgtcagagcacgccgcccctatagccatctgctaacccccaaagagccacctcttgtcgcaagacggcggtctccctgtccctctccagattgtgcattgctggagatccccgtttgtttgaggaagtgttattctgctcggtcttactacagtcccgaggtgatccctatatcgggcctccttcacaccgaattgtgccttctgtacccgcctattaacaccaatatgtattatccgcctaagcctaatacactacacatcatagagcttgggaaatggctagcccgctgaagaatggatgtggcgagttggatcttactagaaaaggcaatcaatggtgcgtgaagtatgggcaggcctttctgatgatctggagggagaaattccaattatttagacttattccgcgttatttcgaccagtctcagagtcttgccctagcaagcactccattttattgaaatacctcaaggatagaggcaacataagcggccaatgatacttgttgtaaaattagaagaaagcaatgattcaacaatgtcatattccagaaagcagcgttcgctatgagcgtcgatataagtatatgtaatgctggacttttgcatctgacccatctgagccaccaatcaaggcttcaggacaggcgggatatcaaattgcaagtgatggaaaaaggagtcttttcatgtcgtgaatacagaaagaaaatcgtaatagccaatgagaaccaaaacaaaacaaagtcatcttctaatgaggttactcatcctcaaactggtctgcccatgttccagtgatgggtgaaaacgaagattccaatttttccattgctgactgtgacttggatggtgcaggagcagtttcgagctggactttagtctcagccttaagcttgttctccggcgcaggcgcagctttggtctcagtcttcttgggtccttcaggcagagccgggaatgcactctcatccaacctcggtgcagcagggctctctgttgcatatatactgtcagctaagcccttgcgtggccggtctccctgtagggcacgggaagatccacggtcacggccacctcgaccacctcgtccacctcgaccacctcgtccacctcgtccacgaccccggttgtcactagaatgatctgcaacatcttctgaacggccgtcttcaaagtctcgtcgcacggcgccagacacaccgccatgcataccgcgtcggaattggctgcctccaccgcgggggtcataatcttcctcgcgtttctgcgagtcccactcacgccctgtctgggccttgagtttacgctgtctgtttttctcacgttcactatccataacgcggcggtgcgcgagttcctcacgacgtttcttcgccgcctcctgctcgcgctccatgaacgacgcctgatcagcttcggcgcgagcatgggctgcagccttcttcacagcgttctccttggctgcagcaatgcgtttagatagttcctcctctgtgagtttaggctggaagtaaacagtcagcaaggtactcttggtaagagcgggaaggactgcatacttttctcagaccaccagtggcactccgatcaccacggacagctggcacacgctgggcctcttcaccaccctcttcgaccggaccggtctgctctttaggctcagcgggcttctcatgcctggaagcactagcctcacgcacatcggcagcaggcgcattggcaggagcctttttgcgcggtgtgctttctgaccgtttttgctctgactcccttccaccgcgtcctcctttgccccgactccgtcgtccccggcctcgttcaccgccacggccccgctgcggagtttccccacgtggaattggttgctcgggagcttgcttctcgggtacatgtgcctcctgtgactctggctctgcctcggcggtaatggcctctgtgtgcgcctgctgctcttctgtggagattgggataatctcgtcgtcgaataggtcgtcagcgccgcgagtttgtgcgaactcgtccatctcggggtctgccattgcgattgggtctggataagtgcactggaaggttggaaaagtcgcgggtgggctgtgaactcgaaactcgcggaattgttgccgctatatacgcgattcgaggggtagctgcgatggaggggctcagatgatggtctgtgtgcaggctagtggagggtgtaatatattgtcgtctttcaaaatttgcaataattcatataaaaagcatatgtaacggagaaacgaatagcagggattacagtggtcacacagctcaactgatctgcaatccagctggggcagtctgctaggcggtctgctattgctgcggagcacattgttttgccgatgaactccgtctgctttctgccgatataagtcgtgcctgcgcttgtttgtactcgacctgttttgacatgctgcaactaggccgatttacctgtcaagggtaagttggtcacttcccggccccaaactcgacaagtcgaattagacatttggaatgtccatctcctcaagtcagagggggaagaaatccggggttctccacaaatgcggagaaaccccctgcttcactccaaggctgttggaatcggcacttctgattgcttgtatttcgtgatgtacgtagttgctcattcaaggcgctatctcagctcctattccttgagatatccgcgtagagacttcatcatagtttgtagatttctcacattggcgtgagtgagagatccttggtcaacggtgacctggctcattcaagggtatagacactgttttgctttttcttcttgaaaatccacgggtatttactgcacaaagctgtctgtcttcggtggggggagctccataaacaaggccaaatttacagcggagttctatattgctactaggtacatgcacagttgctggggaatcccgttgagtaatcgagtctcaagggttattggaactatcttaagtccccatcattgtgacgcaaaggctgttggcaaaacatagaagaaactgggtacatgtaggttgtagcatgagcacagaatttaatctcggtcaactatcaaccaatcagacaggatagtcaatcgctagttaaggactatgatcatcagtatcaagcagggtacctggactactaggtatacacacacttactgccattgcttgagcgtcttctcaaggtctcccagcctatcaatctgctttatatgaatcacactgagagaatctcggtccttcgataaaacagtggacttctgtcgtatcccacgtatcttatctagcaacctttctgtctcgtcatgcgcagccttggcttgttctgaggttggcgtgtctcgtagaatcttgtacagccgattttgccacgccggtaattctgcctcttccgcacccatctgctcttcgagtccagatgattactttattctgatatgtctcgatatcctttctcagggcattggtggttcggacgatcatccatgcatggaacttggtaacgaagtgttgaatcaatccacgctgctgctaacgagataagagagattcctgccatcggaaacacaacaaataaaatgagcccgttcatgatgtagagtttggagcattgtaaatgagtcagtcaaaaagtgagaacatttggaagttggagagtggtaataactataaaactttgaatctaattggctacttcctcttatacttcttagacatctcgagccaagatctcaatatctggatcatcgctgaagtatcgtcaatgccataaagaagtataacagtggtattttgatgttaatctagtgggtatatgatttcctttatatcgaaagaaatatgcagccagtcaaccgctagggactagaggggtcatgttccttttgattagggttagaaaacttattactatcactttctttacttcttcaatagcagccgagtcttaaattagcggagcgctacactgtgtgaagcaaccaataagatacccgcgatagccgctatagaaggccccacatctccgcagtcccttcggatattgcgccgagtctccgatcacatcattggcaatctctctgttcgaaaaacttcagttcgctctggaaatcacatcatgtctgcgggtgacactgccagagagcctgcgtctgagcaaacaccgctccttcgtgattcacccaatagcgatgccaatgagaataccccactacaccaggaacccagtaccaaggagctgatttggatcctcggaagcatttggctcggtgtcttcctagctgctctcggtatggacttcaactttttcaggagtatcataatgactgactttggctcattgcagatacaacaatcgttgccacgctttccgcgcctatctcttcgtccttcaactcattctcgttgctctcgtggctagccacttcttatttgatctccaatgccgcctgccagcctctcagtggccgattgactgatatttactctcgtcggtgggggcttgtgttctctaacgtcttcttcgcccttggcaacttgatctgcggcctggcaagagcacaatgggttatcattttcggtcgcgtcgtagcaggtgtcggaggaggcggtcttactgcgatctcgaccttcgtcacttctgacctagtccctctccgtaagcgaggcatatggcagggcattggaaacatctgctacggtgctggtatgggacttggaggtgtgtttggcgggtggatcaacgatactctgggatggagatgggcgtttttgcttcaggttcccttcctgatcatctcatgcatcttagtggcggttaaagtcaagattcccgtgaaggagtcggataccgcgcgcatcaaacgcgttgacttcctcggcgctatcactctagttctgacattggtcacattattgcttggcctcaacacgggcggaaaccaagtaccgtggacccacccactggtactgacatcgctggttgcctccgctgtcttcctgggtctgttcatctatgtggaagctgtggttgcttctgagcctgtcattcccgtgcgccttttgctgaaccgcaccgtggcagctgcttgtctgaccaactggttcggtaccatggccatcttcggcctcctcttttatctaccggtgtacttccaggtgcagggactttccccgactgctgcgggtgcgcgattaattccgcaggcggtcggcacctcgatcggctctttggggtcgggtatcatcatgcgcgccagcggtcgatatgcatctcttaattatgttgccatggctgtccaggttctctccgctgggctcatctgcactttgaatctccacacgcctgtgggattgccgttcctctatttcttcctaggcggagcatcctatggtagcatgctaaccatcaccctggtggcgctcatctctgctgtagaccaccaacaccatgcggtggtgacatctgcttcgtatgccttccgtagcacgggaagtacgattggtatcacggtcgcttcggctgtcttccagaacaccctaaggctcgggctgtggtctcgattgggtgagcgcaaggacgccaaggagctgattgaacggcttcgtgacagcttggacgaaatttggaagctgcccgcagatttgacatccggggttcttgacgcatacatggactccttgcgcgcggtgttcgtgacattgttgggcctggccgtcctgggagcattgaccagtctggctatgagggagcacaaactgcacaacaacctagcccgacgatagagtaggtattcattcgggcatttaaagaaaaaatgttcgagtattatattagatcagctgccatcagcatatatagggttgcggtgtcggggttcgcaacaacccagcagtcaacgtacaggaatagatcaatagagagacacatgaaacaagtattggaagttgtactccgtcctgaagttgtatgtaaagcacatgttggatgatctcaggcattgaccgcttcggcccaacaactcgccaatcaatctcagcttctcctgtacggccccatttttaaccgccattgaccccgaagcagcattttggctctttgcgattggccgatcgtttccctcgaacgaatctcggcattttttcgccgtgcaataacacggttcactcggtagctcatcgcatcgggtgtgtggcaaagacgtggcgagaccatccagacaacgcaacgacctcaccgctcgaggacaccagttgatcgtcgttgcacagaataaagcgccagtctcgatttcaatcctgggttgcatgattggacttgatcagaccaccagtccgataccttatctctttgtacagtctgagagtccccaatcgatctcgttttatcgcctctcggcttcgattcttctctactatttgcgcctacctatacctttcctgcgaaaaagaagtctgtttcttccctccggcttacctccttatccctaaacacttcagtccgccttattggtcacattggcatggcagttggatttcgagtgaataattcaccaattacgaaaggcaagggcattacaaaggggtcgtggtcaagtgatatggaggtggatggacgctataagggaaccgtgattggaaacaaagcggtggaaaatgcgacatcatcccatcctcggcgccgccgattgcttttgtcgacggatagcgctttcgccgacatcgtcctcccgtccctcgttcagaacccatacatcgagctgcgactgatcacagacgaaccatcggctttgctcacgggcaccaacaagatcccgcactacatggatatggtcgacagtcaaacattcgataagaaaaccggcgcgcggaaatggctcaaggcgaagacggcggagctatgcgaatgggcggatatgctcttggttgcgcccatcgatgctggagctctgggcgcgatgctggctggcttgactaataccctgacgttggcgctccttcgtggctgggtcttgaagaaacccgtgatcctcatcccaggaatgacggtgtcagaatgggaccacccgctcagcagtcgccaactcgacgaaatcagtcgtttttggccttggattcgcactatcaagcctgtgctgtggaagtcaaacgggcccgaagacctgacaatactgccatgggacggcctaaaggagttacaacaaacactagagacaacactaaaactaccgccgtgggaagctacccttttgaccagagcaatcccgcatggtgcagcggtcccggctaaggctgcaaaatctatatctggaggtgctaccggctccacgccacaaacggaacattcggggaaggccgatttcttaccactggaaatctggctaaatgtctttgaggatcaactgcaggactgggaaacagcgaaagctgtgggcattccaactcatcttcctgttccccaagaatggcagagccatctacccaaaatgtccactacggccacactcgaatacactatcttgcgaggatctttcgctgcgatcaaaaagcgcattgatgcgctgcctcgctggaaaccgctctccgacctcgcttgccacctcatcgtcaaattctcccgcaccgacatactttcctatctcacagaaaaccacctggaccttctctggacaacctcccgactcacaaatattccttaccgggcatccgcaatctacggcaacccgaaagtactgacatggtggcgcgatgcgccagctctccccaacaaagagtacatggccgacgccatggacggcgcctcacgagcaggatttatcgacgtcctggattggtggctacactcagggcttccgctaagatacagcgaacgtgctctcgaagctgccagcgccgaaggtcgagtccccgtacttgactggtggaaagccgcctccgccaacgccccactgtccaaccccttacctctcaaagtcggcaaatccgtcctactcgcagcgcagtcgggccgcatcgcatctattgcttggtgggacgcgtcggggattccttacagccacaccgagaacattgcgcgcatcgcgagcacgcacggccatgttcatgtcctcgagttctggtataaactcaagggcccaaagatgatctttgataaccaggtgcttgtgggccccacgaagaatggccatgacaacgttctacagtggtggaaagactgcggtatgcgggttgaattcaaaacttgtgacattgaagaagcgcttgaagatgcggatccgagctctggcgctgaggatcgtgttcggcgttggtgggagcggaacggactgaaccttggagttggcacgagtgagtggatgagatcgaaggttctgtgagacttcattttgcatcactgcatggcttgcgctttcggtcttttggcgtcttgggaagggattcatatctcctcttctgttcctgcggttgcgttttgttctttttcatatcatgactccagatgatgacgacgtataatacccatttgaatgttcacaattttcacaattttcatcgcgcggtagagcttcgagtttgttcagaagctctacaagtaatatatattgtctgtgtttaaattgaatctacctcttacatatcttttccatggggcgatagaactcattctcatttttcaatctagaatcaattataatctacaataattcatgtgaattgactgcaaagacctgcttcatatttactttatattcagcttcaacttcttgagacccgggaatgctcccgggccatagttgctgagtcaaggcccagctcgccgccgcggctccaccagtaaatcgcaaacatccagcaacctccaacctaaccaataaattgacaatcaattttgctgatgttggcaagctgcgtcctgcgacgcgtgctgcgtgcttcatgcccaagggcaatattaacccgcacgcgaaaagcatcatcaagtccttataacaacatcccgtcaaatggcatcaacggcctccacaacattacaagaaagagacagagcgccgctcaagatatccgaccaaataaaccgcgcagtctaatcacggccgctattccaagctttgctgtaccacctctcatgttcatcgggctcctactcggtctgtggacttggaaatgcttctggattattgtcatgcaaaacaagctcctctacctctcctggttacctccattcacaagatcagagtctatttcagattacaaagctgagtgcagaccggtactgtgggaggaaaagcagattcgcagtttggatgggaccaaattggctgtttgtgagggtcacattccggttcctcccagggaccgtgagtctgttttgaatactgttgcttcacaaaatacacaccaggggaaactgatcccgaaacggaaaaattccgttgtgatctgttacttccaaggcaatggcggatcgacccctatgcggttgcctcttctctctcatgtcttgcgcgcaattgcggaaacgtctagatcggatccatctcctatgtctaactccaaaatctccccatatactattgctgccctgtcataccgcgggtactggacatcatccggccgcgccacacagtccggtattgagatggatgcccaggcactcttgaattgggtttcagaaacatatgcgtccccagaaactgatcttgaaattgtaatttggggacacagtctgggtgctgctgttgcaacctcagcagtatctacgtatattgcccgccaatgtgagggcaaagcctcaaatacaggcagcaacaggcccctggcgcctatttctgggctcattttggaggcgccgacatccagcgtgaaagatatgctcatcagcctctatcctcagagatggcttccgtacagatatctttggccgttctcttggaatacctgggatatcaaggcgaagatgcagcaaatggctacttggagagaccaaccggggtctcaagtcttgaatgaagctacgacatcaataccccgctcgcttccgccaatttttcttctggctgccgagaaagatgaagtcattccatcatacgtaccaggccagttagaacaacatgccaaatctctcggcttggagattgagaggaaagatgttatgggtgctatgcatatagaggcaccactcaaactggatggtaggaaagcaatggtgaaattcatcctaaacgtcacatccgtgcctagaacataacataataacctcacgagagatacaatatagacgattgaaagtatatagtaccttactcccacttctcaacacgtacgtgcttaatatccgcatccttcataagcgccttaatcttctcaaactccttagaagcctcagactccccgaaagcaaaatgatcctggacctggttccacccgctaaaaagaacaaactcctcatcttcgccctctttgtcaatgcgccacgcaccgcaggaagaaaacggagccgtgtaggcattcaaatgggacacgccattcctgaaaacagcgtcaaactcgcctttcttgcttggctcgacaaagtatcgagttatagcgagaacgggtgcatctaacgggattttggatgtaggtggctggatccgttagcctatatttcttggtaacacccttgacctacgaaattagttcatcgtcaggatcgaagagctcacatcgaggtccaagtgaaacatccagctaacatcaagactgtccttcaactgcgcgagcagggcctggttgatttcaaatgaaagccactggccttcgcctgtatgtttctctacagactcccacccacccatcaggtagacggatgatgggtcttcgatctggcggaggtatgtgacatgatagccggagtgtgttgattgtttctcttgggcttctatgaaagtactcttggcggaagacgaggggtcttgcgcttttaggcggaggagggcgagttcggtcaccggcatttttatcttctctttgaatatatggcctgtgttttggagggattgtttagtttgacctcgattactggggattggacgttgttttatatgtctgtctactgagctagggtggggggcgctttgtaggcagctgttagaggcgtcatctagctaattctcggacccatttgactaatcggggattattcaatgtggttcgctggttttatcactagtggatgtctctggatgtgtgactttatggctacaagctaagggtttcttttaaaaagtcagtatatatctttgccacagaatttggaaaaagggtaaacgaaattgcaatgcgatcattcaaggatatacacgtccgagacaccagcgatcaaaataaatgttaacccttcagcacacgataaccaatgactttgggtataccgatcaagcaaaagactagacaatgtacgaaagaaacgaaaatcgcaaactgcaaagtaaagatcatccgaacttgcgcattggaaccatatggatcagacctctttcctgtaggggcattaataacatgaggtgtaatagagagaaaaaatgacgtaccaagtgagtccagctttctcgatgcccggggtcttaatagcattcctgtccccaaagggattgtcttcatcgtcttcttcttctggctcactctcgctctcaaagattggacgtgtgtgttttgacgaatatgcaagaggcaggctatcagggcgattcggccgaggtggctttcgggggttgatattaagcccggcaaggccgtcattcatgtccgtgtcttgcagaccaagtccatgtctttgcttccaattgccttccaaaatgtcatcctcactatcactgtcataatccacgctcttgtcgagcacctcgaatgccatcaatgcatccaccagctcctcatttgcatggatcaggccgcctaggaactcttcggtttctatatactggatatatcgaaggatgctatgacgaagctgcttgcaagtatcgaatcggttaatgcactccgcatcctcacccactcggtgggtctcgcgattgacgtgtttaagggcattcaacaggttggtgctagcgacggaagaggcagcaagggtttgcaagatctccgggcgctccttttccatatcaaatctcctgtggctaattgataatttcttatctttcttgactttcctggacttggatttctctttgggactggtcagcacagtggatggcccactgcccgctgacacggatacaacatgacccatcgggggctcgtttgaattcgaactcgacccctcgcggagaaccttggctttcgcctgtgtggcaggctgctttttgggaacttgcttgtatagcgccgtgacccttgccatgccaggggtgtccttataagttgtcgcccattgtccaaaaatctgtttacatttctgcttcacgagtggatccgaaacggaatcagtagctgcgatccgcagacgttcgagcaatgcctcatcggcgaaatcacgcaagaagcgttctcctgcattttggacgaggaagtcgagaatagtaagcgcgcgcagttgtcgatggatattgccatattttctgaactggtcagactgattctcagcactttcaatactcatggacttacagtttcttgcgaagagcccgacttgcttccatcgggccgctggcctggatgcgaactacttccactaaatcgacaataccgctggagtcttcgacttcatattgctcgctcgtaaggacctcaatctgtacggtcactgccgagtacggtttctaacagctatatcagtcggtgctggaaggatgtatggtcttcacccgatgactcacggaggattgaaacattctgccctagccaaggtgatggtttcgaaaactgtatacttgttttgagtaggagcaggtctgggaatggaaaatggtccctggtatcaaaagccaatagtcaaccccacgctgcgatgtcggtatataaatgaccccgcacggcgctgtttacaccaacgcttcacaggaagcgggtatgtatggggctttcgacggtgataggaagcaacttgattcgctagaaaaataccggaaagggatcaacggtgtgaaacacaaaataagggttcaagaagctttcgcgataccttcacgtggtgtacgtggtgtacgtgttgtaggtgacgtcggaggccccaggggggtctcggcgcccgttaatatgataagcgcaatggaactaccgcaaaaatgtaaagaatgttttggtgtttctcagtttgtccaacagggcatccaaattgcaaaatggccttgttacaggggaagaggggagatcaaacaatgctgagacagtttaagcttatcggctggccaaaaggggattagggcggggtctcatgcctgaggccaaatttatgagaaagaagtcattgacgactttaaaagaccagcaataaccaataagacctcgagaaagaaagaatagtcaatcctgactacatttcttgtcaattaatcttgaatgaagctctcatctgcacaccggacggacccatcccaacgctcatatttcttacgcgtactgtcccgcttcgtggtctgctccacccttattctggccgtcagcgtggctctgaaatcccgctctcgtctctccctcctcctcccccacctctcctacaaccaacctacaatcatgtcttaccaacaggaacgttacattgccgaattggccgtccagagggcgtgtctcctgacacagaaggtattcttcgagaaggccaagggcacaatttccaaggacgacaagtctcccgtcaccattggcgacttcggcgctcaggccctgatcatctcggctctccggaagaatttccctaatgacgagatcgttgccgaggaggaggcgagcactctgcgtgcggacaaagagctcagcgctgagatctggcgcttggtcaaggacacccatctggaggatgcggagagcgagaatattctgggtggacctctcaccagtgagcagagcatgctggacatcatcgatagcggcaacagtgccggtggtcctaagggtcgcatctgggctctcgatcccatcgacggcaccaagggtttcctccgtggcggccagtacgctgtgtgtcttggtctgatagttgatggtgacgtcaaggtcggtgccattggtactccgaacctccccgtcgatggttctgcccccattgctgccagcaccggtgatcagcattccaaggctgccggaaacggtgtcctgttctctgctatcctgggcgcgggtgccatcagccgtcccctggccagtggtcctcttgctgccagcaagcccatctccatgcgctccgtcgcgaacatatccgacgctgttttctgtgaaggtgttgaggctgcgcactccgcccagggtgacaacgctgccgttgctcagcttcttggaatcaccgccccgagtgtgcgactggactcgcaggccaagtactgctctattgcccgtggtgccggtgacgtctacctgcgtctccccgcgaagaaggactaccaggagaagatctgggatcacgccgctggtgatctaattgtgcgtgaggctggtggccaggtgactgacatgcacggcaaccggttggatttcagcaagggccggaccttggctgtcaacaagggtgtcgttgccgcccccaaggcccaccaggaacaggtcattaatgccgtcaagaccgttctgaagctgtgattggtttatatattttttaatttgttgcctcttccgctacacttgagctcctggggagcgggatcagtttgaagtagatttgtgataccatcgcttgaataaaaaaatacatatgtgacgataagagtacaaaacacggaaccaaacacaatgtcccgcgtagctgaaaagaaaggcgcctcccgtctatttgatcttcttcgccttgagcttgatagtctctccgttgacgaagatacccttgcccttgtacggctcgggccgtctccattctctgatttcagccgcgaattgggtcacaacccgcttgtcgacaccctccaataggattctggtgggctgtggtgtgctagccacaacgcccttgggaatacccagttcaatggggtgggagaagcccaccttgagggaaacgaatttttggccggggtaggcggcttggacggtggatgccttatcctcgatggtcgccctgtaaccgacaccaaccatactcaagacacagacgtggccttcggagacgccgaggatgtgattctggaggagtgcccgaatagttcctagacagaaaagcaaagtgttagacattgataagttgccgtgcggactggaccgccgcggagaaaagacaggaaaacataccccacatagcacgctggtgagggacagtctgatccaagactgacaaactagccttctgacctgtctcgtcgggggtgatagtgagaaatgagggaatgctcaggctcatctcgcctgtgaatcgggcgagttagcatccatcggcgggaccattaagcaataacacattacccttaggacccttgatctcagcaatgaacttggggatatcctttcctcgcgtccgggtgagagtcgcggggatatcgatgagcttgaatgacacctccggggggatggagagcgcggcacctccgattcgggactgcgccggggatgtggtcgagaagcattgtgtgcggggggagaatgcgggcgcgaggaagatgggtagggagccgcgctggaaaggctctcgaagaagctggcgggcgcagcgttggggtatggagcacgacatggtgacttgcgcgtgtttggtcggatgctgcgttgcggactttggattttgttcgaagatgggttacctcaatgggtttagcgtgcacgtgattatctatatgatttcttctttttatcaggttagaatatcatgatctaaaggtaattatgctctcgactacaggaatcaaatattgggcttgattgcttcgggaaatacgcttgatatttggtatttctcatttgatgcagaggttgttgaaacctagtgcctaacaacatccgagaagcgacacaatttgtcccaattgaaattgattccttcacataccgacattcttcgagatgcaacatctctgtcgaggcctaacacagccgagactctacatcccgtagtagctgtgtacaaaaggcatagtgagattgccaccgactagatctccaacgctacacatgcatagaactgtcatatgtacgggcttttcatcgctattcatatctaacacagactaaaagtacggaggcataagcagccaattttcttgtcacatcatcgttatacaccagccgggctagtgttagtctcgggaatattctcggtttatacgacagttcgctaaactgccctctgactcctgaccgtatattaacgatcgcattagtattcggatggaaatttcttctttatggacaagtaactaaatggtgggaggaaactattcaggaaaaagtaaagcgagagttgggcttgagctaaaacaacttgaatgtcaagtctcactttcgaaatcatccttcatcctcatccatttcttcccatcctacaccactcttctccctacctttatacccattcatctcagacaatatacacgagtgatcaaggaccagggcccgtccaaagctacacacactcgtagaagcagccataccattcactatgagggcaaccgatcgcttccaagtgattgcatatatcttcctggcacttacacacctcggtcgagcaagtgtctcccaacacagtaagccactcagatacgtctcaaatcattttactgacataagaagatgtcccaattcttgcaaccagaccaccggacatcgacacggtctctttcctcagttcccgggcgcaagaccaagacagcatcttcaacgaagccgtcaaaatcctggactcgatgcaatcttcaccctcgtgcaaccggcttgcagcgacaaaactagtgaactcgtgccaaacattcagcgatggcaaggacggcacgcagacggataacccagagactctcgacgttctacgatccgtctatgcagtacgcctggcattgtgtgagatcgacggtgctggtacccaaatgcctccctcgtgcctccctgttactgtctcgccacctccacagaagaatcgatttggctttgtgagtcgacacagaggccccgaccccatgtcggatgaagttccaaaagaattattggagcaatgtctgaggacacttgagtcacgaccccagtggtggacctcttacagcaacagccgacagaatgctcttgtgatctgccatgcctcgcgaatcgagacggagaaagaggagcttattgagcttcaacgatccattgccaagagcagtctcaagctcaacaatgggcttcaagaggcgttgcgaaatgcaattgcacagtctgcgcagcagcaatcattcatacatgctcttcagtctctgcaagggaagatcgtgaccgatatggaagcgacagactctgtgttcaaacgaacattcggcaaattccttcgagaaatcgaagctggaatctggtcgctgcaagattctatatctgaggctttgtcgaatgtgcgggctggaactggggtcctcgaaggggtacaattcgagcagctgaatgagttgaaacatgtactaaaatttcaaccaggatatccggaacgtatctactcaagttggagcacttcaacaggctctacggagtgcacatcaagatgcaatgactagaagccgagagacgttgctagctcaagaaaccaatgttgtcgcccagaagaatctcgcatcatctttacacctgtcgctcgagtcacttctggactcagacatggacaaactgtaccaaggcatgcagagattcgatgctgctatggtgtgtgaaatatacatttaccatgtagtgacactatgagactaatctcttgcccctttttgtaggaatggttggccagccggatgaacatgattcttgagcaagaaaccaggatgacagaggtacgagtacattcctacataccggctttctcactgactttgaaagcgacttcaaaacatggaaacctttatacaaagatccgaatcgaaggcaagcgagctacaaaaggcgcaggaccaacaaacagaagcactatctgcccaatcgcgggcccaggaggccattcaattcgatgcgcaagtgtcgcaagctttgctggccaaaactagtgttgctgctgccaatttacaatccgtcatcgacgatgcagcgttaaagttcaagcatgtcccgggtttcggcattgggggatcctcggcatggtctatctgcgccgtcctactcatcgtccttgccgcccagaaccttaagattgcaattgctttaatttttctcattttgggtaggtgtgttcttcatgatcaagagtgattggtgctaatataaggaggattaggccattctgttgcccttattatcttcaaatttctctagttatacacacgctgcgcaatgatttgcggaccagataccattgataccccagctttatttctttttttcttctattttcgctcctatctctaccatctttgcttgcagcacatcccctatggtcgttcattgcctctagatctatagcaatggaataattcagtcttcttcatttgatagacggagtacggagactcggaggagctatgtatccccccttttcgctaattatatgaaactaaatagacggattgtttcagaaaaaaataaaatgaaagtgcaaattagcgctggcacagccacaatcactagagctgccagaggataagcagcgggatatgacccatttacatcgcagtcagccaatgaaagcgcgttctcgacacagtggaaacaacgcacgagaaaggcaattccccaaaataacaaaaacggcaagtcaataggcatagatgggggcagtcacgtgggagtaaacagatcgactgcgcgcttctcctccttttcgattcgcaacacgttcctcatcgggtcttgattcacatttatcaaatatctgtctcatccaatctcaaacgcgttgatcaaaatgcctggtgttcgtgagtgaccataactacctcctatacttcccgacccaacatttggcgcccgtcggaaccgcaagtaaacagcgctaacgttctccagcacccgacgctcttcagcaggtcaagaagggcttcaagcggttcttcagcctccgcaagaagtccgctaagaagcagaaggccgagcctgtccaggctgcccctgctgagactgctgcgactgctgcccctgtcgccgccgttccgaccactgagacagctgccgagaaacccaccgcccccgctgccgccccggaatctgccccaggtatgacattctatcagtttgatatcaccttcgtctcgcttttggctcccaactaacttattgacctactctagatgctgccaaggtgcccgaggtaaaggatgcaagcaccgcggagcctgtcgcctcccctgagatgaccgctactgccggccccatcgagactcagtacgagcctgagactgctgctgctgcccccggccctgctgtgcagtccgatgcccctgctgctaagcctgaggagtctgtcgctaagcctgaggagtctgtcgctaagcctgaggagcctgtcgctaagcctgaggagcctgtcgctaagcctgaggagcctgtcgctaagcctgaggagcctgtcgctaaccccgaggccactgctgctaaggtcgaagagtccgctgctaaacccgaggccactactgctgcgcctgtggagcctgccgccaagaccggttagtcaaattgtcttcacgatgcagagaataatgctaataccgatgttagatgcgcccgctaactagaagtgtgtatatccacttcattggccagaatggacctttcttcgcgaatctgatctaacttgcgagtgcttttttcctgctccctgtttcgtttcataccctcagcgttgtgtattaatcactttcagaaagcgatgcgttgcatgctgtttttcttttcttccatatcggcctcgatcagaccgcttaatatcatgcaaagctctactcattcattccagaatcattacgcgacagtaaaacccccgccttaatctggtatattatgctactaatgctgacagcagagaagaaaaaaccaactcgcccacgggtatcacattaagaatctatgctaatgctgaacagtttcattcattcccgtctgaggaatgatcatcaccatcagccatagcgacatcttcaacactgacacccgccgctgcagccttcagctctctcgctttttgtctgcgcttgagtttcctatcgcggttcttccgagtccgcttctctgcttcattttccttggcagcctgtgcggccgcaacgcgcttacgtagctgcactcgtcgcttcttgcctggcttcttgcgtgtaagtggactcttagagacgggtgcgccctctaccacgtagactggaagactgttggctggccgtggcattttcgtctgatgtcgtttgagatggataactcgccaggggagatggcagccgggctagaaattaagttagcagctagacaatttgccagacgggtatggatttccttacccagactaaggaattggcccatgtcagcatgtgctgcccgctaacggccacgtcctcaaattgtttcttcttttccgctatccggctttcgtcttcggtggtaggttccccgttcctcgtgccttgaagagaaggtgtcgagaagtaataatcccacccacggaaggctttcacaaatcgtccctcagtgctagcgccagatccgggtgtgggtgaatgcaaccgaatcctcaatttttggattgtgggggcctctgcggcctctgcggttttctcatctgtatccttttctgactgctcggtggtatctttcgttgatttggcaggggcgctgaatagccggaactcgaattcttgttcctcgtcttcattatccgccgcttgcgagggatcattctcttggctagctgtctgctgtgcagtatccagttgatttaaattgagtagctttccaaggcgggcgtatgcatcctgggcggcgtcgtcgtctggtgctggtgattgtgagcgggatgacgctggagagcgcatctcatcgcggcggacgctatataagccggattagccgctaattatatcgaaaaaaaccagggtggattgtttgctcacgtaccgcttagcatttggtagatcgaacattgtgtggtgtgtgtggagaggaataagactaaaatcccgaatcgagaaaagcgatgtttcacgccgctctacggccacggcctgatgacatggcacggaccgcccagcctcacggccctcaccttccgactttgaaggccttttgtctacattgtgactctctactgcgccatttgtttcgtttcatattctctgttttctgcatattccacactccttaccttccgatcattccctcgctggctccgacaaagggtacctgcaccttatctattgggttggttgacgcctcgtgcccatcgcatagcgcaaacgtgcagccaagaacatcccccgattctagtactcgatctcaatcctcataaatgggtatctgtgcctcctgcctcggcgggaatcgccacgactctcctgaggtgagtctaaatccgaagctagtctctttcccgttaccatgttcatcgcgcattacctcggtctgatgcgcgatgcgtgggggttctagtcgcagagtgcaattgtctaacatttctttcttcaagcctgaatctgaacgtctactcgatgatgatccttatcaggccgggtatggctacggagcactcaaccatgctcatcaggctagccagccagattcggaatatgtgaggcgtgagagggaggcgctggaatcaatctgccagcggacatctgagtgagtatactgtcctagttgccttctgttcatatggagttgaattcatgctaatcgtgtcccttagctctgtcatcgatatctggtccatccaaccacaaccacaccttcgaccccaagcaactctccacacccctatctctgcatctcccgtcccatcacaaaggaccgatacaacaacacctgtggtatctacgcaccatacatcaccgccaagccgtcccacctctggctcgtcaggcaccgtcccgaaacactggggtgaagttgtcgtgaacccgaacaagaaacgatctcgtaccaatatcaaaacggattccaaagccagccatgatgtttttggggttctcaacgtcacctaatatgatgcgtttggggcatgcatcgctgcacattgacgatgacgatgtacacgacaaacgagggtgtgggctggtgaaaataaaatcgaggatgcagttgagggtactggaagaccgtttcattattttcttgcgccatgctgttatttttgggggttttttgtttcttgcattgatcgcaggtcgactgtctttcgcacatagccattcattcctctctcttcctggcctgataatacccattggcgcagactctttcttttgttatcagattcttttctgtaccccatgttggcttcttttatgttggcgtgtttttttatttgctgagtttgtttctttgtcttcatatcatcttgttcgtcgtgcactgcttgtatatgtagttctcttttgagtgccggactttattctttctgaattgacacacaatttggattatgtcaagtgagtctcaggaaatctggataatgtacgtagacttctagaatctcaacccatatagtagttcagcttgaggtgggatggctttttatatagaaagtatttcagtttactatacaattgagatatcatgggaaattataaagaacttcactccccatacttatgagagatcggcatcaattattcaacctgtgactccgccgataatgatcgtaaatgctggactgaatgccaatgacaagggggaaaacaaaaatgggattgacagggaaaagaaaatggatacatgacaactcccctatgacagaagaaaaagaaaacgcccgctgatatccagggatggacatagaagagagtaggatgatgcaatatgttcgtgccgggttgatcctaaacctgacggaaatgtcaaactgcagaccattagacatcgtccattgtacccgcaggctcttcaccaccagactcgtagctccccgccgagctgagctcatcttcagactcggtgtcctcgcctgcttcatccacagcctctttgctggcgtacttgtcaacatattctaggagcgagcggtcagtatggtataatagcaaacataagcctttgggttgtaacacacctttcacctttgcctcatatgccttgggttctctcatcatcagcgcagctgcttccccgttgagaggatccgaagggttgggatagcggaggagctggggaaggaagacctcgaagatgttgagcatgtcatacatcggcgaccaggtttggttgatcacatcgagacagactgagcccgaactatagcagaagaatcgcattaacctcaagagtttcatttccacacatgtcagaccacgcttgactcacagctcatcgatgtttgggtggaagattcggttgacgaatccgatgctcgggcttttgtatgggtactgatcaggtaattcgacgtgaattttccaaaggcctccggtaaatggtgctagaaaggttagtatgatctaatactggtcgattatgaatgagacatactctcttccgggcccttgaaacgaacgtaaaattcttgcctgttgcgagtagttggtatcggagagcttcaaatggttgattgtggtgtgttaggtacatacactggagtccggagttagtatagatctatagctgacagagggccagaacttactgttgtcattgaccagtgtcacctcatagtcactcatgagcctagattaaccgttagtatatttcccgtcaaccaagtatgcttgccgagaccgatcaaaaacgttcggagaagcggcggcgaatttgaaagggtagggagttgtcggtcgtacatcctagcgagaatgttagtgccgtgtattttgaacatttctgaacttctagagcatacttcatgacctatatgatgaacaaaaaagagttattagcatctccggcgactctgggggcttatcggacgatccgcaacattactcacatctgtctcgattctgcgctttgggctactcatgttggtggtttgaatgaaggagtattttcgatctcgaaggtattatcagctgcaggctctcacagaaaaaaataggcccagcggtgtcaaatgccgtgattcgcaagcagacccggaggcggagcggggaagtaatgggcggggcagacgatggcctttgaaatagatgttaagtaattcaggggtcggtgattaagtagaagcaaagtgagagggataacagatatcagagaaggcttcacttctcccgagcgaaggaaatagaaagaagagacgagaatgaggtcttggatgaatgatccattagatcgggcccgcggacagtggacctgcccgtgtgatgagtcgatgagtcagcgcctgccggggcccggcgccatgacgatgacttgggataggtcgatacacttctacggtatataattgagaacataattggttcatctttccatgatagtattgtagggttgtgttgctgtaggcatctatatcgtgctacatgaatggttgaactttagttatacctctgtgagtaattctcgcggccattctatagttacactctttgaatagtgtttccgacacacatgcacaaaaaagaaagagacatgcgccctgtacgtcctatatgttgtagaaagtgtggatcagatgtcatccatagctagccatgtactccctactaataggatacttagaacaagaggcactgcggctaccattacagaagaaatccttctgggagagtaaatagcattttctttcgattgtctaaagctctttttttttctgatcagaaattaagcaaaactgggtcatactctgttacctaggtccctccagttaggttaggatgggtcacgtggctgcctcagctacagcatagtatcatctctttcagctatcagtgcaacaatttttggtcatgtttctttcttatgtctatgattacaggtttgaattctagcatacaatgttatcggtgagctgtatgtttggatatgactgtagtatgtcggctttgaaaaagaaaaagaaagtgtaggtaactattgcatgtctcctcctgaatcctatgattgggaataaaaggggcatatataaaaatcgtgggacaagatgatacactcagtgagcaggaccatatacatcaacgttcttctgaccaaagtgctaccactcatccactttttaccatggccaccgaccctttgaaatataatggaccaaatcaaatccgaccctatctgatgaacgtcttgatgatgaaacatagaaattgaaaagtcacacgaatttgtgtcgggtgaaatgtctagggaggtaaagggtaaagaggcacgatatacagctcgaaggcatatctggactttatataggcgcaagctcagaataattatagcctcgatatttcattgtagatctttgacggaagaagtcagtataaatcaaaatatcatatggaaaatcttcaatcaatttgagtgacgtgcgaaatactgcgctcagcttcttcttacgtatctagttgtataaattctgaagtcaaggggagaaggtgatcacaaaccactatgcgctgatatctaatgaagtagtagttgtttgtttatatataaacagcatagtcagccctcgagccattcccattcatatgccgctatatatcgcgatatgggacttgaacaattctgatattcaatttgcaaggatatgagaagcatttcaatcgaatctcaactacgatatattctataaatgtctttgtgataaccagtggtaaaccgtagaattcggtgacgagcataattgctataaaccaatgtattcatgcatgtgtgttctctagcggtgtaaatgtgtatgtgttgttagctagacttccctgataaaagcccaactgtagcagcttaactcgcagcaagtatcctcctcttcgcaaatcagatactagtgatcatgtttacgtctgctacgggtgcctaattaagaccgggcccgcaggaacccgctgtacgggaagaaagcgattggttggaaagtggaaatagtggggctgttgcctaaggttgcctaaggatgcctggacgctaacgctaagtggatgtcaacgatatgaacctaaacattcgaatgttggcttcctctttatttaagacttcgtctccccattttgccagttgatatatccttacgcactctgattaaatttgcaccattctcaacatggcttctttgcccaccctcccagtgaagcacaatgacttcgtgaagtatgtcaacgccaacttggagaagcccatggtggacttggttcagccatataacgagtttgacgccgttctgcgaaagaaattcgcccaagacccctctcatccatcaattcaagataactatgccaacattgtaccgctgtatggccagaccggttccacaaatatttccattcgagctcgagaccttgtctcagaaacgccagagcaaacggagaagtacattttgcccttgagtgcaaaagaccggaaaccacatggttctgcggcagttgtaccctctttgaatgagttcaagaacaactttgcgctctttacagagggctcattgagtgaaattgactggtctaacgtggtcgctgctggtagcgctgtcgtcacctcacttttgcctgtaccagaaaaatatcgcaactcaaagcgtggccttcgcaagtactaccatgaggagtttgctccagcgtcagatgtggatctcttcttgtatggcctgaatgaggaccaagcgattgagaagatcatgcacatcgaggataagatcaagaatactatcctctatgagaccacgaccattcggacgaagaatacgattaccattgcttctcagtatccgaaccgccatgtgcaaatcgtgcttcgcatctaccgctcaatcgctgagatcctcactggcttcgacgttgatgcttcgtgcgcggcttttgatggtcgccaggtctatgcctctccacgtgcaatcgctgcatacatcactcaagtgaatcggattgatctaactcgaagatcaccatcatatgagaatcggctctccaagtattcacatcgaggatttgaggtcttctggcctgctcttgatagatcgaagattgacccggtgagaattgaatcccttggacgagagggatgaaatgtccgaactaatttttgagatagactatcttcgagagaagttttaccagaactgaaggacttgcacggctcctggtattggaaaagcttcctcggtctcacgaccgggacaactacctccaaaagaggcgtgaggaacgaggtcgtcctcctttgagtttgtacctgaaacgtcgtcagggtaaaatgctgcatggtaatatcaaggatgactgggaggatgaggtgcccgaatggcaagagcaagaccaagtgtccgattaccatacttttgttcgtatcttcaccacaaccgagcttactcccattcgactatcactgaccctctgatagactattccttacggtcggagattcaacgccaggaatatcgagaagctactttacaccaaggatctgttgctgaacgcccaatggaatcagcccaaagaccgcacagtttatcttcatcgtcatccagcattcttcggcgaggcggaatatgttattggcgactgctgtggctactgtcccaagcctgtcaccgaggaggaagtcaaggtcgctgatgaggagggcaagatttatatctttggtcatatcactttcatcaaagatgatcctggccgccaggaaattggaagtttcaatccgatcactgaaaccgattggactggtgagtgaattgtccgaaatgtttctttctttctgaattatgcactaataccaatatccaacattgtagaaatggcttatgttggccgcaccgagaaactttgccaggcaatcttggcaaacgatgttgactccgtgaaagctttccttgcggatgagggtaccgatccagaccgtcgtgactacactggacggacaccgctccaactcgcgtgcatatgctcgacccctgaagtggttcaatgccttgtcgacggcggtgctcgcatgattccccgtatggctgatggaaatacagcgctccatcttgccgccgcccggggagacgtcgacatgattcgaatcttactcacaaagagcaatgagaatgaagaagaagaagccaagaagcaggattctctgaaacataaaggagagtcaaagaccaagcccagcacagacgaggatgaagatatcgatatgattgaccaagacgatgccatgtctcacacctctgcctcttacgtcaaagtcgaaagcgacgaaaagaatttgaacgtgtatgatacgctccaggagaatgacctcgagccggatgtctacgacattaatgtcgttgcatgggatagtcggactgctcctttgcatctcgctattctacatggtcatactgaggccgtgagagagcttgttacatccttcggtgccgatgtcttgatgccaattaaaatcctgaatgagcgcgacaaaacaccccaggctgcaattcttaacctggttcttgttcaagtccttccattcgaaaaagcaatggagatgtcgcagacccttcttgagctcggcgcttcaccagcgcaagcagacctcaagcagaagacaccgctacactaccttgctcaatccgacaaatttggaatttttgatatatacgtgcaacatgatgagccagcagtaaagcgcgccatcaatcacttagcagttcagggccattcctacacaccagaattctcctcggcgttgatgtttgctctcactgcgcagaacgcactcgcggcagccaagctgttggatacaggggcctacccgaagattgatcccgcagaggttatgaaggctattacgatatctagaggacgcaggacctactacggcgtcaccgaagaaaacgcaaagtattgtgtgaagcagccaatcttgctggctattgagaatgacctccctttactcgccattgatctgcttcatcgcggggtaaatcctaacaccgatatcagcgaaagatatcgaaaccaggatcggacggtattggacgtcgtgcgccaaactttgcgtgaccttcgtgaattcttggttgtgcgcaagtaccaaacctatgctaattccatcgcgactcccctcgatccgaatgacgatacatatttgtcagatttccaacctggcacttacaaaatggccattgcaaaggatctactcagcaacgcgcgcaaggcaaaccgagagaacgaagaacaagccaagagggctgaagctgccccggccgatcctcctggtttggctgagaagaaggcgtttattgcggagttgatttgcaactacgagaagctggagtccattctgctacaaaaagatgcaaagacttgggccgagcttcatcccccgcagacaattcccgtgcagttcccagtccacgtctcgaccgagggaacacagctcacctctgagccttggaagatcaacttccacttcaatgtaccaggcattactgattctgctcgtgacggatatctgaaactgtatgtgcctccttttatctcacaacctaagaatatcccactgacattgatataacagtttcgaagcagcttggaatggcgacattggtaccataaaaaccttgacattgggcatgtggggacctctcaatgagaacgctccgcttgagattgctgtaaccgacaatcaaggcctgtctgccctttcaatttctatcatgcgcggccatttcgcagtggctaagaccattcttcgaattctccacgtgcagtacaaggtaaaagcgcctcgcggtcggatacactttgagatagatgtcgatgagtgttgtgatgactgtgatgactctcatgaagagaacgaagatttgaacatagtcagtcacattgttgatgataccttcacccacgagaacatcggtgaagttatgactcaagtcgagagcaatacttctcctcttgagacgttcgagaaacggttcaatgtcttcctgtttttcgacgagtgccagaaggaggattggaacaagcgagccctcctgtttccgaagctgcaccggcaccgggattggagttggatgaataaagacaactcgatcaacaagattgggttgttgaaatacgctgtgtacacaaacaacattcctcttttggagttccttctgaagactggattggaccttgcctctaccaacccttcggtaaaaggtgagttcttggtcaaggtcgacgagttccagcttgcaatctcacttggacgtattgattgccttgccaaaatgattcaaagtactggagctggtcttccacttacaaaattgagtgatgactgttgcgttgaggagaagaaagagcctcagtactaccctgggttgtcgattcgtggcagcaagcgtgctgattgggctaatgccggtcgagataaaccgttaaaagagcgggcacagtgtcctcctctccttattgcggctcgtcagggtaatttggctagtacggagtttttccttggtaccgcacctgctcgctattacttggagtatctcaattcgaataaggatgatgagagagtcaaacgattgactaagtccaagctcggactggaaggaacactcttgacctggcttcaagaaagaagtaagtgccacctattcaggaacccggacgaacatagctgaccatataaaagacaacctcgttatccactgcgcaatcatctccgaaccaaatgacgaatccgttcgtctagttcagtatcttgtggatcatcaccctgaatgcttggaagtccgatcgacagagggattgacgcctctcgcctgggccatgtcccttcacaaggtccgatttgcccgcatcttggtagaagctggagccaaccaggctgtccgcgacaaagaggcgcgcaatctcctccacctgattctcgtatcagccaatggtcgagtctgtaggaactccagccgatgcagcaaactcctagacctgctggataagcaactcctcccaacaatgctcatggaacgcgccggtaaaggctcaaggacgcccttttcccgttggcttcacgcccaacccgactttatgccaagggacccggccattcctcggccccctaagagtccccagaccgaggatgagatagtaacctccatgacgagcctcattctgggcctagccaactccacggaccaaaagcatctcgaggtctttgacgaagctggaaacacacctgttcatgatgctgtgaagaaatgcttcccccaagtccttggacaactccttgatcgtcgtcctgacatgctcaaccgggagaatgccaccggtaccactcctcttgaaatggcagttgacgcttgggtcaacaagagtacctctggaccgcctgacggttctccaaggtcgcaggttaatccccctgtgagtcagagcgctttgcagcgcggttgtcacttattcatccccggtagcagggtcacgtatgacaaggagatggctacgcttcgggtttgtcgggaatgggcccagcaacgacccggaaagagaagacttgttagtctgtttgaggcgaatgaggtcgctaagagattggtggcggcgggacaggctactggccgtgatggtgttgtctccgaagatgataataagtctgaggatgatccgtggggaagcatgtttgatcattgctagtttgcttgtattgaacatggtaatttctagcgcaatgattatttgtactgaatggtctttcttttttgcaatatatcctaatcatatctactgcttcattccctgtttctagaaattccagctacttgccaatgaacattcctgtagcttcttttccactatatactggaactgaaagattaagaaatataaatactcaaaagcagtagattatgatcacctcaaaaaatatcatgaacttaaccaacccggcttctgactcagtgctgctcctcgggtggcagctgaaccttcactgcactctccgccagagctctgttccgactattcttgctagcgatatacgaattaatatactcgggcacttcagcgaccgtaccatcaccgcttggaaccggggtaccaaacgtttcccataccggaacaacaccagtccagacactaccagtaatctgcgcgttgcctgagtccttacgctcatccgaaacaccaccatcacgaatcttaccgctgccatccacaatccttaccttcaggatgacagtcgactgcatctccgcacgatccggcggcacacgcgagtgatcccagcgatccgcgaggacagagttcgtgatcaatttcatggcccagagcttttcttcatcatctgtgacgagggtcgcatagccgtgtaggatggcagaacggtagttgtagctgtgcgagttgggcgtgagcgataggatcagcccgtctactttgcttgttgcgacgcatatggggagtccctcgccatcgctgcagctgcgggccaggttcataatccgtgagctgacgtagccgtggaggtagcactctagaggctcatcgatgctcgcagaggggaattcgaatgatcccatttgtcctatcatcggtaggattgcggggaatgggtcgtccgggcctgggttgaaggatacatgaagaacttgggagtcattgatgattgaatgaattggacctaggtcatatgtggctagaatatagtgttaatagttgaatatagtgcagatctatagtgatctcgtacctcgatgcttgtaccggttggcggtgttggaaaccttcttcgggtaggtcaaggttcggcccatgatgtatggcagtttgtagaatgtgtgtagttaagagaagcaagaggtaagcggcgacgatataagcctttaagtgtttactacgtagatagatgatgaatatagataggtgatccgatgagctagggcacgccttcaaacaccctttttagcaggtccatccgcgcaaggtttccccacaaaggttagaccgagacattcttgatagcaggctgcgcacagatgcatcaaaccaagaatcatgtatacgacatgacatgggagtggacaagagaatggtctccgatgccaaacgcagccgaggtgattggcccacaccgccgactggaccgcgaacctggcgataacaacgactccaacagtttactcttatcacttatttttgggaccttgaagcatggcggcatgcaggtctctcgtgcgccagtgcgtcatcaatctgcgctcatctagacctttgagtcattcattgcgccaactgcctagatgcaaccctctgtctcgcagttatgctacctcggtggccgccgcggaactcagattcggccaaccgttgcatgagacgcatccccatatcctcagcgcaggcgaacgtttgtcattatctgtgtccttgagtcttgtttatttcgctgatcgtctgttgtgtagttactcccggaataaccgcccttgaatatgcacaacgtcgatcgaagctcgccaacaagctacccaaaggcgcgattgcggtgttggctgcctcggaagtcaagtaccgtgcccaagggatcttcaatgagtaccgccaggattctaatttcttttacctgacgggtaagtttgcttggcacgcccgtgatgccgcggaggacacccgctaaacagttccacgccggataggattcaacgaaccgaatgcattagcgatcatcggaaacgacggctctggcgataaccatattttccatttatacgtgcgggaaaaggatcccaaggcagaactctgggatggggcgcgctccggcacccaggctgctgtggatgtcttcaatgcggatgaggtgcgaagtgttggcttaaccaggtgaatcattgagctgacaccgagaacagacaggaaacattgaacgcattggagatattttgccgagtattgtccagggagcgacagaagtttactcggatatcccgacattcgatggttcaagatcatccttgaatcggtatctgtatggaccaacactcgcgtcggaaaagttgaagaaggtcgtcgaccaccgcagagtcaagcccctgaagaatctgctcaatgaaatgagggtgttcaagagtgaagatgaggttgtacagatgcggcgactgggacaagcgtcagggagagcattcaccgaggctatgcgacaggactttacccgagagaaagatctctattccttcctggagtaccagttcaaggtgaatggttgtgatacaaacgctttcgttcccgttgtcgcgggtggccaggtaaatctctcgacttttttttggtgaattggacactgacgaacctagaacgctttggctattcattacacacgaaatgacgatgtattgaagttcgtatgcctttccaaactattctgagactctgctcacgcttaattttagggatggtgatttggttctcgttgatggcggtggtgtaagttcttctaatctgaactcgatcttacagctctaggatactgaccaaattataggaatggggaggctatatttctgacattactcgaacatggcctgtcaatggcaagttctctgatccccagcgggatctgtacaatgctgtgctcaaagtgcaccggagctgtctcgctctgtgccgcgagacttccaaactttctttggacaaacttcatagcatcgccgagaatgggttgaaagatgagctcaagtccctgggctttgatatttccggcaatgtatgcatccgacctccttccgtgggtatgccgctgactccgactaggcactgaacgttctcttcccgcaccatttaggccactatgtcggcctggacgtccacgactgccccgggtattctagagggtacgacctgaaagcaggtcaatgtataacaattgaaccgttcgtccccagcctctttctccgcagacttgaaacaagctaatacatgccaggggtatctatgttcctaatgatgaacgatggcccgcccatttccgtgggatcggaattcgcatcgaggatagtgtttgtgtcggagacgaacacccgattgtcttaacccctgaggctgtcaaggaggtatgttttaactctagtaaccccccgcatgcactcgtgactaacttttaataggttgcggacattgaggcactgcgtaattagatctgatgtatacggtagccgttagatccctcaaattcccatgtacaatagcataaggcttcaaaagatcatatttgtgcccctttattttatcctatctaatttctaaactaaaccctacatgtctggactatccttgcctagattactttgtggtggctggtctgcggccaacccgaaggctggtccggggaggttggagtcgattcggcaatttttagcggctgtatgttaataagagaacattgcacaaaatatccccagagaatgagaccgagaatggaagtagagaagcaaagaaacccgaaaagaatcttggtcgcggtcaaagaatgcaatgttgatgttcatgcttcgcgctctgccgttggttgtcaggcctccgcccaaaacaaactaagctccacaccacacgacgtgctttgctcttctttctttcctcctccaggtcttccacctcgtctttctcttcccatccaacccttgaacacttcgatctatttctctttccttcggctgcttgttatcgtctcttggatacaatgtccattctctgatctcctctaaccttagacgtgtagcacgcgtgctcctgaccgagtacccctctttgatatttgactgttgtcactatacaacgtttagacgcgttctcgaccctgggaacttgtttcccaatggcaactgtcttcgtacctccctcgccacgaaactccatggccatggcgactcgtcgtccactcgcaaacgtgccgaatgcaaccaattctccacacagggcagggctgttaccagttaaacgagctcgctctactcaaacggagatcccgtacggacaaccaccgccgaagaaacaattgattgagagcatgcaatacgagtctcgttccgccacctgtcagaccacgaacacggactcgaaacttttcgcccgacgatcgaacaacagtaaccctagtgcgtttgaaaagaggctcgtcgcagccagggagaaggaacgccaaccgcaagtgaagcacatgagagtcgagaaggctccggcagataccatggactccattcgacaatggcagcggcactataggaaggcattcccacagtttgtgttttacttcgatagcattcccgaggatgtcagacggcggttctctcgccaggtcactgcacttggagctgtaagtcatattgcccacagaacattgagctctcccgtcttcagtgattacacacccccattggcatcttctctaacacactgcgatatagcgcgaggagaagtttttctcacgcctagtaacccacgttgtcacctcacgagctatccccccagaatcggccaccccagcagaaccggagtcaactgtagacgctagaaaccgcgatagcaacgttctgaccgtcaacccttctctcatagagagaaatggcgacaatcacctgcatgcttctttgaaaaccgagacccgacgtgaccaaggcaccatggacattctgcaaagggctcgacagatgggcatgaaaatctgggcgttggaaaagcttcaacgtatgatcactaccatcaatgacagtgacatcgccgcccaatatgaacaggctgctcggaataaggccgctggtggtaacgccgccaacgctgatctttcgcgggttcttcgtcaggaactgcttaatgggccgtccgatcgtgatccattggcatcacttgagatgataatgttcaaaggtccatttgtctacatccatgacatgaacgagaagaccaaaccagtcatggttcgagaatatccccgagtcgctagacgccaggatggatcttggccacagttccgaagtgcccccctcggaaaatgtcccttcatagatgagcccccaagcaggaaggaatatgaccgacaccgattgcgccaaattcacaaagagaagaaggctgcatctcacgcggctgatgggacacgtcatgctaagccaaaagcagctgcgccagttcaagctcccgaatctgtgaccacaacagagatggcacactcccagccatcggcaaagcaagaggaacgggttccgcctccaatccaaaatgaaacccaaaaaccattggatgaaacccatgagcgaaagagttctgaaagctttgttcctccccacttccctcgcaccgggcccttctatgctggttgtgagccagctgcctccggtattcagccgtcgaacatgacatccgcaattcgctcacaaatgatctcatctactgctgctgcacctggcgcgaaagctgggctcagcaaggaggttcatgggctcaaacgaaaggttcttgagaaaggtacaggtggattcacggcgggatcgatggctgctcctcaacgccgtggggatggattcaccacggttacgacgaagaacaacaccaacccccctggtaaacccaacgttgtcatcaatgaaaatgaggcaaagcaatctgaggtcgctggttccaagcgacaaagggaggacaaagatgagcaaaagaaatccgaacgccgcagagatcctaagcctggctattgcgagaactgcagggataagttcgatgattttgaagaggtaaaaaagattatctaggtttccttgttgcttaggtccttctcgatactgatcaatctcttagcacactttgactcgcaaacaccgtcggtttgccgcgaactccacgaactgggctgaactcgatgcattgctctccgaaatccagcgccccctcaaggacgaatatgaatatgacgaatagatttgccgtttctcacagcattccatgatttcctttcgacctcggcctcttctatccgatactttcgcaccctggtggagtatctttcttctaccacattgcatttttatttccgtcatgtccgatttgaacctcagaacctcgcataaacataccctcggcatcgacacatgcatggtggcgtttttttttccccctcttctttttgtttatcatgcatcagcagtaccagtaaccagttcctctccgacggtctgatctgcttggcttgacctcaatggaggtcgtccactcttttacagcatctttcttcacttctttcgattgtattgaatatccgattttaaaacagcatcaggtcgccttggaattcgtgaaccgacctatatcaaccgccgacggcaattttggatactttcatttctcatgttgctccaagaaaaactcaacgtcgacgctgcttgtctcatgtgcaaccagcttctgctttacggtctctaatggtggccggttgcgatataccgaaggtataatggacgatttagcatggaccaagggttcctaaccttgcattgcactccgttctaacacatcgttatcccctttttggtcccacggggccatattttctatctcgtcagcttttccttgcgtcttctcactggtggtaccttgttttctgatgggctgtggcttgaatacccagcgtaggcggccgagtctctgttgagatttttactttctcgtgacattacttacccgaataaccatttattcgactcgatgatctgtatgcagtttgtatcgtgctaattgaattgtctgctataaaatatattcttcagtagagaacaccagccagaagtagaaaagtagaaagtgtgcgaggcccctcacttagcccaatgcggtaatcacctcggcgtgacgtaaactgcgagcggtgacattagtgccaggcggtgagagtaaaaaaaatatcccctcgagctccagtcaatgtcaacataataaaagctttatattgaatattcagttgataaagagacaattatcatagtcacatattcctactagcgctagatcggcgtgaatgcaccgttcctgagcccatctaccttgcagccccgcaaaacgtctcggtactcggccccgtaatcggcggcagtaacgaagatcttcaacttcaggaatgaatttgtgatgctcccaactacgccgcataacccagcacgttccgggcagaaggatattgaaaatacaaaaccgaagctccggacatattcctcgatatatgacctctcgccctcttcatcgtttttgctcgcacacacgaaaagcttcagttcgccgctgaagtcataattcctttgatattgccacttctacagctcggacgggatacaacttgtgcatatatcattgcatattggtacatattgagatatatacttcttgggcaccgaaattctcgctattcgagatcgtgcgtcacgaggtgcagccgcgccactccgtttttgacaatcataccacaaacccaatggccgccccaggctctgtgctgcagcgcacagcgctaatctcttcatcgatgctaagaacgagagtgatatccgctaccaggacgcaagccacacacacccttcgcaccggccgctgctctgccctgtcctcccacataccgacgcaccccctcttccaaacccgacatagctcctactccgcgcccacactccgtgaaaatgaaaaggcgcgaaagaaggttactatccagacgctccagaacatgcacaaaaagggggagccaatcacaatgctcacggcacatgactttcccagtgctcatgtagccgatgcgtcggggatggatatggtgttggtaggggatagtttagggatggtagcgcttggactggaaaacacgacggaggttgttatggaagagatgattcttcattgtcggagcgtagcgcgggcaacgaaagccgcgttcattgtgagttgccgggattttttgactggctccacagtgccaccgactaacaatcataccccaattccaggtcggagatctaccaatggggtcgtatgaagtgtgcgcagagcaagccatcgagtcatcactgcgtctagtcaaggaaggtcgcgtacacgccgtcaagctcgaaggtagccaagaactcgcacccacaatcaagcgcatcacacaggccggtgttccggtggtaggtcatgttggtctcacaccgcagcgtcagaatgccctcggcggcttccgtgtgcagggcaagacggctgtcagtgcggtgaggatgctgcacgatgctctcgctatgcaagaggctggcgcgttcatgctggtgcttgaggcgataccgtcggaggttgcatcgatcatcacgcagaaactgcggatcccgactatcggtattggtgccgggaatggctgctccgggcaggttctggtgcaggttgacatgactgggaatttccagcccggtcggttcgtgccgaaatttgttaagcagtatgcggatgtttgggatgaggcttcccgtggcatttcgctctatcgcgatgaggttaagagtcgggcgttcccttcagaggaatacacgtatccaattgcgaaggatgagctcgccgagtttcagaaaacggtggacgaggtcttccgggaatcatgatgcgcctgattgccattttttccgtggccatttcttgcatattttgtctatattaatgcatcatcatcatcatttgtacatagcatcattgagcagttcgcgctggttgttcatagcctactcagccgaacgctggcgtcattgaataagcgacaatcaattgatcgtccgttttgaaacactattatgacattagcattcaaactcgaggaagtacggtagaaaatcgagttgacactcaccctccatagtccgcccatgccttcatccagcccaggcgcaaacacactattaacataacaaaagacagaatcggtctctttgcagtccagcttcttgcgcaggaatttgacaactgtctcgaatttctgcgaagcgctaaccttgaacacccgacttttcaaaatcggggctgatggaagaggctggaagcgaacagtaacttaatcactattagttgaattctaccatctgaggatatcgcggtgatctgatcaacccaaagcccggagaagaggggtcctacctttccccgaatcaatactctccacgtctgcaagagcctcgtgcgcatcacggggtaaattggtcagcatgaccgatgcagacatattcatcggtagatcagcgccatggtcgtcatctgggatcggggcgtttgctgagctgggagtgcctgagctctgggactgccgcaggcttgggcgatggctgagtgtggtttgtagatttggagtgggggagcgttgtggagaacgtgttggagaagatggattcatgatgtatgatgctacttagagaggtacgtagatgggaggagaaagatgtaagtaagttgggggttgacggaggcggggggccttaacgcgcttaaagtttgggctacgcttagatgtgtaaacaatcattttctgtagagcttcatagctctgaaagaagtttgccttcttttcttttcatagataattgcaaagggtttacttagatccaaccttctggggtcggaggtgtaaagttaacatcaggcagaattttatctgggaaaagctctctccacttctttccaccgtcctacatcgtcgggtcacgcaaaaatggaaccgggcagtcttcgatcattgataaaatgcagctgcaaggagtcgcagcctcagctgtagctttcttcttggctctcgctttagcattgtccaaccgaatgctcttgcgctctatagcgaggaaaaccaagaaggacaccccggctagggcaatactctagatccaaacggcctatatctcgccccataggaaatatcaactctttccctcttgactccagtactacatttgtacatgtggattgctatcgtatttcaaacaatgtacccaggctctgacatcacattgtaggctcatatcttccgtatagaccatcgccgtttctcccttttgataagcttcatccagctatataagtagctctctgtttattgctagagaatcatttctgcttctcttttctccctgtcctctgatcgtcccaaaatagtctacagggcaatttcgcagacgctaagaacttcatgtcaaaaactatgcgcataccaacaaaatgtttgataaactcgtcctgttgctcctgtcttactttttggcactgtctagtaagtttggcctcagtttggtctcttttatttcagtcgcgatggcgattcggatagagcaggggcctgagtccaccgtggcggagctcgtccgccttgctgaagagaagggcggtcgagtaatggccgacgtggccactaacctcatctcaatcgttatggtgtgtgctgtgaccctacaaggcatttgacttgtgtaccaggtgttatggagactagttgaccagtatatcccttggtcgctgttccccgtgaaggaacaacaaactgaatcctgatatagctagtttctagcaccaggtgctgggaggttttatattgctgcttttcccttgtccgacaagcccaagaagggattggtgccgagaaagtcaacgatatctcgaatctgcagaccgcaatctcgaatcttcaaaccccaagtatcattgtggatttcctagatgaatcaataaactataagtaggcaatggcatatcgtacaaactatgatcttgttttactcacatacaaatacgacattagaactaagagaatatgtaccaggtcaaggctttcccgagcctccccactggttagagcagcacttcccacaagtggcactattcacttctccggttcccaaggctcgttctccgcccaacggcctggggcgcatggttatgcgcggaatatatatctggggactaagtttgaacggcgatgacgcgggagggagaccgtatatgcagctctgaaagaaacgagataaccaccttcaatctgcaaaatcattcatatctatcaattctatggtttaatctagacctagataacaataaaacagctttatatttaatccctccctctttaacttgcctagatcgatagcacgttgacttgtcaaccaggagaatgatcatagattgaacctctttctgtgaggatgggactattgtcagttctggtgcgagagggaggtcaattacaagtcatctttgattctaggcttaccttactatatcattgagctatgtatgtctctctaaataaaggcagtgtcataatgtttgccagtttgttataatacagtcacagttcctttcatatgggtgtatatggcagcgacaaatcggagatcgtctgataaatgcgtatggtacgcttacggaggatagttttttaagcaaatcatatcttcgtttgatcttccattcaactactctcctccacttctttatcacacaacacaccatggcgcctgtctatcatggccagtggtcttttgacaaggacactttctgcgtgacttcctccggtggccatgttcacccacgtgcgacgtattccgagctggatgacattttctgtgcacctttaggcgacatcagggacagagctgaccatcaagatcactggtacgaagcacaacttctccattttggactaccaccgacaagaagcaaagctgcagccaagatgaggttgatggatgccttccaggatgaaactctagatgttccggagcaaattctccggatagaacaatcactgtcgaagaagtgggccaaacgagactcagaggctcgtgtaatgggtccttcgatgcgacccttatttcatcctatcatcgggagagcggcggcaaccgacactaccgaatttggcaccacccagaaaccgtggggtaatcaggagggaaatgcatttggtacaggcttcgccggaggagccagtatgcaaggcaacatgcgaccccaacgaaaccaaatacgaccccatgctcattcaaatggaaagaaacgtaaccacgaagagctcccgacccgccctatgaagaatgccagatctcgtggtgagactggtggacccaacttgcaggaccagatccaggtcaacccgaacggcgagaccttccatcagagaccgacagttattccagtctcagttggaaacggacagccactcccggctccaggcatggaattccaacaaattggatatcagacagtgcctctatcgcaccagactacatatgagacagtgagttgtctttccgtgtataagaaatacagtataaccatatctgaccacaaacgcaggacacacgactatcttcacccgggctaatggacatcgacggtccaagtgattagtctaggtacggctacaatccagccaatattctcaacctcaaggctggatggagttcagtagccaaggtatgagtggacttcgggatttggattggtgaaggcaaatttgagataagctaggggcatgagaatttgtgttaggtgctactagggggagaggaagattcgtgaaatgtttggagttcaattgattcaacggaatttgatagcttgccagtctccactttatgtatcaaccagtccaccactatgatgcctcatgtcaaaaatcagtggtactcgttgtccttcaacaagcttcgcctctccacataagtaatctcaaatcgaaaaggtgcatcaacaagcccagttgacttctcccattgtggatccagataccacggcttgatcagcaagacctcgaagacggtgggttgtcgaatctgatgcagcgggataagccaatcgtccagacggtttgttacgtggggatataaatggatagtcaatttcttcaggccaggcagcttggtagcgagaatctgacagcatttattccaacttagaccaccaggatccggaaagctgagctgcagagtgcgaatcatgcttaagcgctgtggtagaagtgtacgcgaaaaatcaataatcgtatctgtgtggttaaagaggaaagtgttcttttggaagatcatatcaataacctcggagtatctagcacgctgttagttggcttatttcaaacatagatggaagtactcacagtcttcgacaggtttgtaaaagaggcacaaaatccgctcttctcgtgtcaaatttccactcggagttctcgtggtaatatgatccgtagttcatgggtgtgatgcagtttcccccgggccgacgagcaagcaatccccaacaatgatgactgcatggacagaaattgcgaggctcgctgcataaaatcccgacaatttctttacgggatcgtttccatttgtgctggtccggtcgtataatatgcagcatccggctacatagataatgttcccaaatgagaagtcggacttcagtgggtagacattcgaacagaggagactgggcttgttggagagtagattgttgctcgcgtcgttttgaaagtgatagtcgccatccacgactagtcgacactttgaggtcttcattctccggaagtggtggggtgagtggcctggggcggggttttgtagataaactgaggtgatttgagtcgtcatcttgaactcggttcttctttgccaaccctagctttttgccatctgcctcgtcgcccaggtttggcgccatatttgaactcgtagagtgaaagttggatagtgttgcgtcgggcgatagcgacataagagctaaacacgctgacgtgtaacgtcagcgcgcgtctcagatgtggactctaaatttgaaggctaagagctaagatttctatgaaggggatagaaattgaattgaagtcaagatgataaatcaaacaacgaacgtcgcccaaatgtaaaacatatagtaccgggacggccttgtttgtctgcattaaactatgccaatgaactatatagcagagacagtcaccaaaatcagacgatacttgcactggatgatctttttcactttcgatcaagctcgggatttcacagcccaggtatatatagtggatttttacagggaacccccatatcgacccttctgcctgattatgcctgagacaaacatatactaacagtaacaaccacaaggaagagacggatagcaccaaaccagaaaaagttcgaaaccacccaacgaggaacgtcagaagcgttatatctaacaaaatccccgtctatccagacagacaggaaagcgaaagaaaaagacaagtaaaggggacatagtggtaaatagccaggaaggatccatcaaggtcgacaacccggccaaagcataacagagggaagagaatagcaaaccctgactccggtaaagaaacccccgtcgagcttgtccctgccggagaggttattgcggagcgaagcgaaggggctccaaaatcattagaatcaatacagtgaagatgtaatcggctaacgttggcagaataatccaaccggcaaaccaaataaaccaggtctaatttggctagacgataatttctattacgtgctaactatgtagtgttagcctagttacccaagcagtttctcaagcagttgcttaagtacttagaatcctagagcaaatagactctcttcctttagattaaactagcacgttacagtgattacagaactataaccaagtaagcaagcaaggatggagttgtggcgatgggggccgaatgaggggccgaatgaggggcggcgaccttgcaaggccaaagtaatatattgtctaaggaagccgatacaacgtacaaaccagcgacgcgaacctaggagcctgactggccaactatcgtcctcgagagtggatactccgatagtcgacgcacagtggtggctggtcaatgccggcggcgacgtgaagacaatcctccttatctcgataaatagggagaggcaggccctccacctcgaaagatggtgccttgctccaccccacaaccggcccacagcccgccacgccccgagtatggtcccgacgaaggtggacgaggtagatattatcgtgggtaatcccaggccatactcaagtactatacgtagtactgtactaatcattgccatcataggttggcacagccggaatgtctactggcatagcagtctaacctaattagtataggtcaatcttggcattttcaatacacggaccatttaatacggtttcgctactgtaaaatgcacagctttgaataccggaggatctattagtcctataatgtctattgtttattttaattcatgtaatcaggctctataaattgctaagtagctgagccagtactccattgattggacctatattttacagaaccggtttagccgacatgttttcgatgccttacagatcaggcctcattcggtataaattccccgcatccccactttcatcttcgcccttgataagctcagctcttcaacgtccatattgtgacttgaagaacatggctgaaaagagcattgtaccggccgctgaccttgaatcatttacggaatatttaggaggctgcaaacgcatcgttgctctgcttggagctggaatctcagcagcgtcaggcttacccaccttccgtggcgcaggcggactctggcgctcccacgatgcaacctccctcgcgactccggaagccttcgatgagactcccggtcttgtctggcatttctacagttatcggcgacacatggccttgcaagccgacccaaacaaagcacactacgccttagcggagctatcgcgaaggaatgaagacttcatcacattgagccaaaatgttgacggtatggatgtcggacaagtgcttctgtctgaattactaaaatcccctcgtgtcgtttttaggtctctctcagcgagcgaaccatccctcgaagcagctgcatcttcttcacggcactctgttcactgtcaaatgcaccaatttctattgcgattacaccgaagacaatttcactgaccccatagttcctgccctcgaaattccaaagaagagcccaggccttaatccctctgcgaccgacaagactggcgaggaagcatcgaaagcgctagcagaagcgctggacggcaccagcaacgaagtagacatatccgattccagcaatcctatcgccacagtgagcaaagaggagctacctcaatgtccgaaatgcaaggatggattgctccgaccgggagtcgtatggtttggggaacccttgccggagaagacgctcagcactgtcgacaagtggatcgcggccgggccaattgacctatgtttggtcattggcactagcgcaaggatctggccagctgcggggtatgtccatgaggctcgttcgcagggcgcccgagttgcagtgtgcaatatggaccgcaaggatacaccgggcgagcttcataacggtgactggttcttccagggagatgcaggcgttattatccctgagatactcaagagcgttattggcgagatctgaatctcatgggaggatggatacgggaatggcgaattttgatattggggtttgcatgaactggtgacgagacacatgatagttggatgacaaggagctttggatttcatacaaactgttatttctaggtaaatctacgaatcttacaaatgaataggccaattgcacagactccgagacaccactgccgtatacaaatgccgatcatgcctcgggtattcaaatttaaaaccctagaaatagcggaattatgagctgatctacaattgcaaccaattggcccgaatccaacttgtatttgatatgcggggttcgtaaggagtacatatatagatctacattaccctcaacatccaaggggtgacatttaaactcggacgcccccttgacaatacgtaccaccatcaattgtacctcaattgcgcgacagacacaatgaagtcgacaactacagtaccccagaaacgaaagaaggaagacagcgatgatgaggatgatattgtcaaagatggcagcctcacatccgctgctgacaatttcttcgaggcactgtgtatgtgatcgaagcttcacgcagtccattggaaaggctaaccttctttccagttgaggccggtatcacatactgcttcgtcaacctgttagtgactgtattagccactaattctatgtgttctgaccggtctgatagagggagcgaccatcccgcgatgttggaagcaatgatcaaggctaagcaaggtgagtaccggatatgttaccagtaaccagggcttatttatgatagaaaacaaacccaattttccgagaatcattacctgcccttctgagctagttgccctatcagctgcactgggatatgctcaagctacaggggttccggtagatgactacgcccatcatatcaattctttcgctaacttcttgcaagcaatgcgtaattgtgcatgtcgactgcggcactcttgctatgggacagtccatacataatgcctccgtcagcagagttcctgttttgtgctttgctggtttgagcccttttactcagaatggcgagttgttgggttccagaactgagttagcaagccaaacgaagaaggtttacatggagccagctgactgatactgaagtacaggttcatccattggctacaagacgtacctgatcaagcagcgattgttcgacaatactgcagatacacgggtgaaataaagaccggacgcaatatcaaacaaatggtctcgcgagctttgcagtttgctacatctgatcccaaaggtccggcatatctaatggctgcgagagaggtactcgaggaagtaagtattcgaagttatcgcaataagccaaaattgtctctaaccatatcttatgcagcgtgtgggaaatgaatctctagacggtgaaattctcagttcgatcaccccaagtgcattgccagagcaaggtagggtgataatttgagatttgagatttcatatcgctgacagcaatagaggtagaattgattgccaagtcgctgatgagcgcaaagcgaccgcttgtcattacaagttatcttggtcggaatctcaaagcgccagccctcttagccgaactttgtgataaacttccaattaccgtcgtggagatggtcggctctgacgtttgcctccgaagtgaccacgaagcatatcgcggcgttaccgtcactactcatccggaagttcttcaagctgatgttattcttattcttgattgtgatgtgccctggattcctactgctggaaagcctcggagtggtaagaatgtccaaaaaaccatgtttcagtgctgttctgacacacactgcaggggcaagggtattccatctagatgtcgatccgttgaagcaacagatgccacgtaagttcatatatcgaccgtattgctgacttttctctgcttttttattaacgattacataccagtcttttcaatcaatgccactcgcaagctcaaggttggctgtggaattgcgcttgggcaaatcaatgccttcttggataaacaggatatcgaccgggctaagtataccctggagtttgaggagcggtcaactaactacaaaacctggagggaaactttacaagcacttgaatcaccgtcgaaagatggtgtagtcagtgtgccatatctggcatcgagactgcgaaagtctctcccccaaaacactatttacgttttggaggctgtaaccaatgcaggacacctcatccaccatttgaacttgactaaggtatgtatttatgccaatgtgctgattctatgctaatcaaattccagccgggaagtctgattgccagcggcgcaggtggtctaggatggggaggtggtgcagcactgggcgtcaagctaggcaagcccggctcattcatatgtgcaatgtaagtgttcaccagcgcgggagctcttccacaatatctaataagcatcagcgtcggcgacggagtctatctattctcgcagatggaaagcgtatattggatcgccagacgctacaatatccccttcctcctcgttgtgcttaacaatggcggatggaacgcaccaaaggtgtccgcacttctggttcacaaggacgggttatcatcgaagtcgaatagacgaggtcagccagatctaaactaaatatcttgtgcatagtagctgatctagtacagatctcaatatctcgttcgacccttctcccgattaccccggtatcgctgctgcagcaggtaaggcgtggggtgcgacagttaccacgcgaagcgagcttgatcctgctatcaaacaggcaacagaagttgttcaaagtgggaaatgtgctgtggttgaggtttcgtgagtgggaatagtggctcttaagtaacaaccgcttactttcatctatagtgttccgtctatgtggaaagagaactagtacaaaatgccagaagggtaaatgggaaaaccagttctcattttctggcttcaagaagaatttgcttctttttgtggtgtgttatgttgaaactgcattgtctccaatgcaatgggaggtagttgttgctttgaaagtatgaaatatgtcagctactagacatagattgggtactagcttgtatgcgattgatctgattgatatctagatgtaatactattcttgtactattctccaagaactagatgtgccttttctttccctgtgctgcctgaggcacccagccgttgctaggccaacctcaaacaaagcgataaccttttggaatcgataacgacttcttctccctttgatgctcgcaaacccccaccatcgacaaaccacttcggattcaaggcatcatctaagggtgagtgtctccaaccctgttatattggttacattttcctggaactcgaaatttcagttcctaggggatcccacagtccacgagctggtcgagcccacaaataacataaagagactaactgcgaaatccagtgctcagatatccctcttcgcgtcttgatgccctaagattagatcattccagacttggttatcctgtgaagtcaacaaacaaacctatcaattgtctgacaagatctactcaaaccacaacgtcaaaacacgatggctagagaaagcactgcgccaatggagcccctcactccagggggaaaaccaaacacccagcctcacccggcacacatccaggaacccgaattcggaaaaccctcaccgatcggccccgcacagcacaggtcaaaccaccttttcaacatcccgaagccaaatcaatctcgtgccgaacatcatcgacccgtccctcgaccgcatccgcaacagcagccacaatcacaccagcaaggccattcgactgctacgccgttggtgaagcgaagcgagccatgggatccattcaagccggtcgcaccatcagcctacaataaccctcgcggagggttccaacatggcgcagtgagtatcaagcgacccgaaaatgttacttggacaactccccgggcccctaggcctgtatatcaatccaagcctgttccaccaaagatggcgggcgcgacgaagaatatacagaagtttatagatctcacacgcgacgacactgatcctgttccaagggcatcagcctatgcggcgccgggcttcggggctatggatatgaatggctacgtggatacggctatggcaaacgagaacatcaaagctttgctggagggtgcattcgaggatgaggaagacaaggctgagccgaaacctaagggcaagaagaagaagggtggaaagaagtccaagaagatgtcacagaagaagcaggatgatgaagtcgcggtggacgagaagaaggaacaagcgattgacgacctcgatgatcttgctgctcaacttcaaggggtcacagtgaacgacccgaaggataataatggcgccaagtctggaaaagattcatctaccaagcttgatgaagaagacaacgaggcggcagaggcggaagaagaagaagatgaagatgaggaggaggattccgacgatgaagatgccggagtcgtcgaaggcttaaaagtgactcttcttccccatcaaattgaaggtgtgagatggatgtgtgacaaggagactggccgaaagacgtccaaagggattttccccaaaggcggaatccttgcagatgatatgggtttgggcaaaacagtgcaagctattgctttactgctcaaaaaccgcaaatctgatcacgaaaacagcgatgacaacaccgagtccgcaggcaagacgaccaagtttcccccaaattgcattgcctccactttggtaattgcgccacttgcactcatcaagcaatgggaggcagaaatcaaggacaaagttgagccatcccacaagctgagtgtttgcatctatcacggtacaacacgcgcaaaggcttcaacgactttagacaaatacgatgttgtaatcacaacgtatggaactcttacctccgaattcaactcgtccgcatcagacaaggccaaaaaggcgggtattttcgcagttcattggtaccgtatcattcttgacgaagcgcatacaatcaagaaccgtaacgccaaagctacccagtcagcatacgcattggaggcccaacaccgctggtgcttgacaggaacgccattgcaaaacaacctggatgagttgcagagtctcatcagattccttcgcgtgaagccctatgacgatttggccgcatggagagatcaaatcagccggcctttaaataatggccgtggaggtctcgctattcagcgactgcaggtctatctgaaggcctttatgaaacggcgcacaaaggatgtgcttagactgaatgacaatgtgaagcctggcgaagaagaaccagacggcaagccaaagaagtcctcaaatggattccacatcactaagcgtgaggtcattaaggtggctgccgaattcatgcctggtgagttaaacttctacaaacgtctcgaacagcgaacggagaacagtcttgagaaaatgatgggtggttccaaggtcgattacgctggagctttggttctgctgttgcgtcttcgccagtcctgtaatcacccagacttggtcaagggtgatttagccaaagacaaagatattcttttgcagaacggcagtacgaatagccagtcgaagtcggatgaccttgacagcatcgccgatcttttcggggcgatgagcgttgtggcaaagaaatgcgatgtttgccaaacggacctgagtcaggctgaaatcaaggctggtggcagtcgctgtggtgaatgtgaggccgacttgaatgccgatgtcataggcacagaaaagaagaagaaaaagaagtcgaagaagagccacaaaaagcctgacgttccggactcaccgtcagcccgcaaatccgatgcacaaattgctcgttctcgcaaaaatcgacgagtcattattgacagtgacgacgaagacgaagaagaaggcgattgggttatacctcgcgaccagcgcaagatgcctaacctcggaaaagcaggtggctcggacgatgaagacgctgaagggggtggtgaatggctcatttcggatgatgagaccgatgatgagaccgatgatgaggtcgaatcaccctccagaaggaagagccagcccataattctgagcggttccgatgatgagagtgattccgaagcggatgacatctacaacgatgaaggagaaaacggagagcttccatccactaagattcgtcatcttatgcggattctgcatcgcgaggcaccggacttcaagttcatcgttttctccgtcttcacatctatgcttgataagattgagcccttcttgaagagggctaatattggtttcgctcgctacgatggtggaatgacaaataaccaccgcgaggctagtctcgaaaagctccgaaacaacagaggcacccgggtcttgctctgcagtctacgtgctggtgcattaggcctcaatctgacagccgctagccgtgtcgttatcttggagcccttctggaatcccgtgagttacaattttaaatcatctattgcgcattgtgctaaccctgaagctagtttgtggaggagcaagctattgatcgtgtccatcgcctgaatcaaaccattgacgtaaagatctacaagatggtcatcaagggtaccgtggaggaacgcattgttgcgttgcaagaccgcaagcgcgaactggccaatgccaccatcgagggcaagaccggcgctggcaagctcaccgtgcgcgacatgatggcgctcttcggtcgtgatgcagaatcccgattcaccgataaccagagcaccctagacttcaaccagcctactcgactgctgaatactggtgatgagaatgagcctgcttcttcctccactcaggagtctgcacactctgttccgcgcggccggggaaacgaggtcaagcctaaccggccgcgaaatgaagactcggtttatggccgacggtggtaatcagcatggtacgaaattatgaaatgaaatttggagataacgtttgcgggagtcccggttggtgtcaggaatgtgttcgtatttctattaaatttatttcatttcttgtttgatgttatattttactggctgatctcgtacatatcttcaacccattgttgctatgctaaaacacacgtctccttgcccttcattccccattgtcggcctgaggttgctccaggctaaagagtggtggaaccttggtcgtttgatggctggcctcacgcctcccatgtatccggaaacaatgcccgcgagtcggattcccgcccaattttagacatggcgatttcacaatggcgctcggcattgtgctccgattggcatacctatgaatctggataataactgccgtcgctatagataggagcagttcaagcactattactacaagtgtgctgtatgccatctatttagtactgatggatgggctaactcaacttctttgatctattctgacttattatacttgatatggcagggcagaagctaattgagagtctagttgtcaaatccaagtcagttttaatgccgccatccaacacgcttatcacactctagctgagcagaccactcatctagaatgtgtggggtatcgagcagagatgattctcgatgggccggaacaggtacctccatgtcaggttctatggttctggtccggaatcgccgagtctggccttcgtgcgcttgaatgtcagtaattacctggagatctttgattgaattgcgctggcagagcacggagttgaccagcacgccaaacctctcaagatcaaagagcggactagggtcaatgcaaacgtacacactcctcgaatggtctggatatattcaagccaggactcgatcagactatttgccgaagcttttaccatggatatgagagtctggtccaaaggattgcgagcgattctcaaatggtagtttccggcgaaccggacaagggaaccgaggacatgctcccagggaggaagcttgtttctggtggatcatgccttgataggttgaaagcccacagaagaaagcatgggctggggaagaaaacccccgtaaccccggttgaagcatggcattctggagatctttcaatcttgtaactatatactcttccggtctcatttgattctcttcatatactctgtgtgcacccaaattctccttcatacacgatggttcatgctttaccgcgttaatacatcgctaacattctgtgagctgcttcctgccaaattcgctgcccaatttatagctaacgctggtggccttcctagttcgaaccattctcggctgctctctctgctgaggatcgaaggctgagatatgtcttcaccgtccgacattaaagataacggggattggacggtcatttacgatgaccagagtgacgatggccagaacggcaagaaagaagaaaagccttctcgaaggaggcagtctctcgcgcgaacgttatccataccgaagagcatgtgcatcatgtctgacaacaagactgaagtatcgacggtagccgagctgctatccccgaagttgaaattgcctcaactgggcaccgaatcggcggaaagagtctttcctgttcgttccgtcgtctcatttgattccacaccttcatccgccctgcagacaccttccctcgataagctcgaaacaccgatatctcctttttcggacacatggagtgcaggcttcagcaatgaacaagcgggctctcagcagaaaagtccacctgggaagagtacgaatgctgaggatggtgtctcaaagagatccgaccatcccactcaaccgcgtgctgagaatgaaattccatcggtactcaaaggacaaccttgctccagccataatcttgacattttggcacaattgaaaaccactgtgcaaaacggtggcgaaatccttgacatccacaaatcaacaaaggggatatgctactcgcatgaagatgaagagaacatcttcactcagtcattcggcgcactggttgtgataaaagagtccgacggtaactttgaagtgcatatagcaagtgaaaactccaaggaaatcatacagcattctcctgatcaactcttcgggcttcgaacattttgtgatatattgccatcatcgcaacacagcaactttcttgctcattctaaattcgttttgagcgacgactactcagtccaggactctggtcctgaggtcttcttcctttgtgtattgtcacctgacggatatattcagggtacttggtgtaccatgcatacgagcacagtatataaagactatatcatttgcgagcttcagcccgagcctcgagggacaaaggttcagcccgatttggagaaccccgaaattcaaacgacaaaagcggatagccagaccttggacatgacctctggagcatttcctgagaatatcaatcctccgggaaaagaccttgataccagaaatagcaaatttcccgacccatcggagcttctcaataccatccctcgaatcctccagcgatttgcaactgctcaaacgctagaagcgctcgttcaaaataccatcgccactctgcagaatatcattgaatttgacagaactaccatgtatcatttcgatattgaccgcaacggaattgtggtcgccgatgcagttgatggttcgtcggggttaacttcgtacgaaggcgtgcatttcccggaatcaaccttccccgaaggattgaagaaactatacacacgcaatactgtatgctgctcttgttctagaagccagggcagttcaaaacttgtgtatcgggcttccaccaacaaaaggcccctcgacatgtcaaacacctatatccatgcagcaccggcgcccttaacgccgcataccgagaatcccgtcagggcctgtttgtcaatccaaatcaatgtctttggtaagctttggggtctcatatcatgtcagtcctacgacagtggccaaatgctccatccgctcatccagaaagtgtgctggtttgtagccgaggcggtttcaagtaacattgagcgtctgtcctacaccttaccctttcaatttcgagagccggacatctctttggataaaacgcgcacatctcaggctataaagaccccacccggtgatcttctcagtctgttcggggcagattacgctgcagcgtcgatcatgggcgaggccaaaatcttggggaaaccaatcgactcgcaggaagttttggcattgttcgaatacatgaaagccaaagaaaatgacacggtgttttggtctgcagatatcgctgccgattttcgggatctcaattactcgcccggctttcatcatctttctggtttgctttacgttcctctttccattgatggtcgtgattttatcatcttttttcgggctgatttagagagccataaccttgcttctaattcaagccggcaacatgaatggtcgtcggcagagtttggaaaggcatctgtactgtctttgctctatcgcactttcaccgatatatggcaagagaaggaggttacactgcagaacaaccagttgatgaggcttttactggctaattcggcgcacgagttcagaacacctctaaatgcgatcatcaactacctggagattgttctcgatggttctctagatcaagaaacacgagatcatatttccagatctcactcggcttctaagtcgttggtatacatcatcaatgaccttctagatctcacgaatacggaaaacgggcaaaagttgataaaggacgaggtattagatctctccgagaccctcacggaagcaacagacatattctgggaagaagcaagacagaagcatgtcgatctacaagtagtccaacacgcagccctacctcccgtcctcggagatcaacggcgggtacgccaggtgatcacaaacttgatcagtaatgctatacagcacacatctaccggagcagtgacaatcgagtcttgtgttgttccggagccgctggagacagatcatatctgtgtcgaagtcgcaatacatgataccgggtctggcatgtcccaacagactgtcgaaacattgttctgcgagctggaacaagtatccaacaagggatatatgcagaatcccaactcatttgaacatacttcaagtggccgtgtattcgagacggaaagcgtgcttggcctgggcctcgcactggtcgcccgaatcgtgcgcaatatgaacggtcagctaagcttgaagtctgaagaaggcaagggaagttgcttcaagatcaggcttgtgtttcctcttccgggtgaagatagtattcaaaagcagaactcgtgtgctacgtcaaacggacatgtgcagggggatgaaagaaaagaagacacaaagaaagacatcacatcctcgaattgcgtaacaaaccagaacgaagggggtattccatgtgaatgtggtcaaagtccagaattcgaatcaggaaaatgcgtcgtgcacgccgaggtaggcttgaaaaccggggaatcgagaaagctctccctttgtggcgaacagctcgatcagagccaccagccacaggtaccggccgctttccttccaaaagaagatcctgggcaatcatcagaagcgtccaaatctcctgtcaaagaactcttctcgatctcaccacccacaaaatcccctaccgaccagccccaaccccctcaacccagcgtctctcccacgatggactggaacctccacgtcctcgtcgcggaagacgacccaatcaatagcaccatcatgcaaaagcgccttgagaaattcggccacacagtgcacatgacaagcaacggcaaagaatgcctatctgcctataaagctgatcccacccactttgacgcagtgctgatggatctacaagtatgtcaaccaagaattaaacaaattccaactcaatgcacatactgacactcaatttcttacggcagatgcccatcgtcgatggccttggtgcaacacagatgatacgcgaatacgagcaagagctggctaatggagacacgcctgcgcctcgcattcccatttttgctgtctcggcttccttgctcgaggagaatcggaagatgtacatggattcgggctttgatggatgggtcatgaagcccattgatttccacagggttgatcggttgcttgggggtgttaggcttcagtgggtacgtcaggaggttgtttaccggcctggtgtgtgggaggctggagggtggtttgaggcatagacattccagaatgaccataggagctgagatgggggttatttcgactcgaagaactctgagaagggggtgaagatatccaatacccaaatcggggcattgaaatcatatgcaaaaattctagtctttctccatggtatctatacaaacagaaaagtaaatgcaaaatgcaacaaaataaaaacaaatgtaggtaaactcgtcatatcaaaaattttccgctatatcggtgaagtcaggcactgtatctccacacttaaacgaagggctatatgccttgcttggcatatatccattcttccatgcggtccgataactccactgcgcggctgactctgtccgccaggtccagtagaaccatcccattgccgtttcgaaggaagacatctgtgcctcggcatatgtctgaaggaacttcttgtaggtatccgaatattccgatgggtcctcgttcgcattcgagcagctgcacgttccttcggccgctgttgggcaataagccgtcgtggaagtggtagagtaggtcccttcccatcgagtacctcggccgacgttgttcaaatactgcgcgcagtcggtgtctgcctgcgaccattcaccacaaatggttggaccccatctggttgtgtattagcatatgagattacaaagagacggcagctcaatttaccccgaagtagtcgtgttgatctccttgatcatagggtaccaactattacagataatgttgaccttggcggtgtggttcaacacgatctcacccgtgttgaaagtagtatattgatgggtgtcgaggtacatgttgtccgggtgggtttggaacatgctgtcccacttggcgagattcagaaacccatcatgcaggacaatagtggcagtgataccattcttccggacgagttccgctgcctcctgggtccaatttaggaccttctcggtgggcagggtgagcatcagtggctcgttcaccagaccgtagatcgttaccacattcttatatcggtcttgggcaaagaactgcgagagttggttgtgaatctcaagcgaccgcttacggttgagcgtaccgtctgtaccggccaaccagccgatgctgccctgccggccgctatggttccagccattttgactgccaggcagtccgtggaggtcgagtttgatccgtagtccatatttgcggcaccactcgattgcgcggagtagataacgccacgcaatcttagggacgtatgggtcgtcgtcgtaggtagtcacggcccaataggagtatgggatgcggacgtgatccagcccggcctccttgatctcttttatatctgactctgagatgaattcggcataatgctgctcaatcgtggccgctgcggagcttccaagctttttagtcaaggtgtactcgtcgataataccagcgctagatggccacttgctgaacaaagacgggacaatgaagggctcgatagacagccatccgcctaaattgactccgcggatcggctgtgtgccgtaagggaaggccttgttaagagcaggcacattgtcgttcgcctgggcagtgtcatcccaagtcgagttgatgcccataagggaaaggccacccacagtggcatttgtgaacgtaagattgaacccttcggtctggtaccacgtaaatggatccaagtaggtgcccttggcgtaactctgaagtaccgctgtcagcaaattccatcgaggtgatacactcgagacttactggaatgcttgcgcggctgataccgtccaaattagaggtagtcgaactgttcccggaggaggaactcgtttttgaatctgagcccttgttttttgacacaacaattgcaaccgggatgatgatggcaagcaagaggagcatcgccaggagacatccgaccaagatacgtttcttcctcgaccagttagaccaaaatttccaagccggtggccctcggttgtccgagctgccttcccagctgtcttcatctttccaatgatcttgcacagcaggtccaccaccgccacgacgacgaacccgagcatcagagccatggccttcttccaaataagcaccagacacaactcgtgcgccggccttatggcgtgagtggccctgcgcaacttcagcaccaagtgccgcaccagcagcagcgtccaaagcagctcgcttccgctgtcgtcgacgttcccgacgcaagtcatcttctccgcgagacttttcgatacggtccacatcctcgtgctcagcagcaagacgcgccatagcgtccacactcaggaggtgcgcagcactactcgaagactcagtgctgcgatgtttcttcgccgaggccgcagcagcagcagcatcaacttcccgccgacgctccctttctctttcgcgctcgcgccgtctccgccgacgcgcctcagcctcaaggtcgagatcaacatccctggcccgtctatctctagccggactcgcactcgcactctcgtctctgcggtaccgcctctcgcgatccggccgtttagcaggcgacatagcaggtgagcccttcaccctagaactccccctctcccgctccctatcccgtcttctcccctccccagactcctcataagcaagtccagcctcttcctccctccgtttgcgcctctgttccctgcgccgctcccgctcctcgtcataatcatcgcgttcattatgcgagttcgactcgtaccctgcttccccacggaagcggtattttgcggtgcgcgcgttgccaggactggacgttgcgccttcgtcggtgtcctcgtagcggccacggatgtactccctatctcggtctcggcgcaagcgctcttgctcacgtgtgcggtcgcgatcccgatcccgatcccggtcgcgtctgtcgggtcggtctcggtctcgggattggctgggcatgccagatgggggtgggggttttggtgtggtatgcgctgatcgggatggggaatgtggaattattgttcgtagtgattgttgattgggttgttgtgaggtaagaagaggaaggggaaggagaactgatcggaatgtattgagattgggttggacacgtgggcattgaggaactctagccaagtatcttggaactccatctatatggggtcggtataagtttgttttgctttttccccgcacggatatcccgccaagagattgtataacaaggtaaaatgtcgttatgtagggtttgctccctataaagcccttgatatattattttataaactctgtacagctcacgtcttcatggtgtatacctactttgtcattctaggttaggatgtgtaaatggttgcggagcaacgggtgataaacgcgtccttatatatgtacggagtacggatgctccttatgtacactctagatacaaagatgcgaaagaactcatttgtatattgaaatgcaagatataacattaaatacaccaatcccagtccacatagacatgctccagtccattctaaccaaaatacaaatgttcatatcaacgagtcagggtatggaaactccaaaacactataaggttaaagaagacatcattgcgaagaaaataaaacaaaagtgaacaacgccgaccgaaaagaggagtgataaggaagaaacaaaacgcgggtctgattgtttgtgactgccataagtatggatctgtacagctgtaggggaagatggagacgtggcgatgcatcatgatggtgatgatatataaagaaagggatgaaaggaatgaattctcgctgtgtccggggaatctaatagaacgaaagtgagatggtgcctcgagcactgcatctcttgctgtaaagatcaacgcagtgaaatgcatagtcgatgtgcagtgtgcaatcagacagggtcatcaaggccgtctccctctggccgctcccaatagagggggagccggaacgtgtcgaagtggtggcaacccagccaagaagttagagctagcattcattcgccgacctccttgggtgctaaactgggaagcattgatatccaagccgggatttcaaacgcaactgcgagtcgaaaccacgtaggttagcacattagcccatattgtgcgggtatagattgtcagcagtgacagcgccacccgcacgagcgccaattggttttcaccgaagtcgggcctgtcagctaatgatttgtctggctccttctttgcccaggacgcctggctcagtcggcttgggactgcggtcgcggccctttttccgactgaagaatgatagcatgccattggcttgcttgttcttgtcatcgccattatccatcccatcggcgggggtagagttatgagccagctcactccagctgccagcttcgtttaggaccatttggaccccaccacttttgctcatttgccgcgtggcaccccggtgtctattgttggggggtagaggtcgatggaaggacggggcaggcggcggttggaagggcggcggaggcggaggtgaaggcgacatgcggcttgagggagacggaggaccctgaccagttgcggggtcattggggtcgggtgtctcgctgagtatagtcatgttgtcactctgttgggcgcggtagtgcgagccatcggcttggatgggagatgtatttttagggtcaggctgtgagaattgacgggcatgcgcaattggatttgccgggcttgtggtattcccttgggttgttgtggcaattggaaagcactcctcgggatttctgggacacaccattagcacatggggggaaatgggtttgacgggaagagaaacgcacattacggcagcaatagcttccgcggcattgccttggtagctagtcagggtgtagtcaaacggttcaaacattgtttcaatgagacggtgaagctcttcatcacgaatttccttcgcagtggcatcttcccttagctcagcgcgcggcttttgtctacgcgctctggcctccaagggcgcttcttcaagaagtagctcctctagatcgtaagtcgcatcaaagttagttttttcgcttgatgggcggaatactggtgggatctgtttgcgctcaagggcttcaaagtcgatctcggcgaagaacatgtgcgaggtgtaggtctcgaacccgatagcaccgattcgttgagtccgatctttttgtatcaatgatcccaacgccctcaagcaagctactgatactgcgggattggtgacgtagtatttcggctgcgccttcttgatgttttcgcttaaggtttcttggcttcggccttcaaatggtcgctgcgctgaaggttagacaggaaagtagacggaaaacaaatctctcataccttgttgtagatgcactcgtaaaaagtaacacctaatgaccaccaatctacctcaaaggcataaccagttccttcatagacttccggggctaggtaggctagtgttcctgatttgcttgtaagaggtttccccggtcggtaatctgatgccacgttctatgaattggagttagccgaagctcacaccagtggtgattcgtgccgatagaacttacaaaatcagccaggtgaacatgtccatcggaatccaacagcacgttgtctggttttagatctcgatgaatgataccctgcgaatggatatacctcagagcacacccgagttccgccatccaaaaccgcactgcatcctctgtgaagcattttcgggagatatggaatcgaagatcaccaccgttcattaaatcaaccacaatatagcttgaatctggtcagcaaggagtgacgatagtcaattccagaatactcacatgtactccatgtctcggaaactgtatcgcaaattgcaaaggaacggatggttcaaatgctcgagcattctccgttcacgaattatatttcgtacgctttccgaacgaaccactgaagcgaatgtcagctacagctttcccaacccggcagctttgtagttccaacaaaccttcctctttgcgaatatattttagggcgaatgtaagacctgtatccttcctttcgacgattcgtacttttccaaatgcaccctttccaaccacacggaggagccggaaatgattgaggttgactagcagagaaggagccatcagcatattattcgaaataatggaagtccctaagacgtcctccccgagtcgaggccagtaaacctacctgcatcgttgcaggacataggtttcccctgagtatttcccatgttgcgaggatagagcgatagccagagtaatcaaagttgactagtatcttgctagcaacatcacacttgttccaaaagtcttccggtcgaatggcgatcgcgtcaacggatgaaggagacagattttcggtgaatatcgagcttatctcgcaatttccatgagaggtgactgaattccgaaggtagaatggccaagcgggggggggggggggggccaaaatattatcgagcttatctcgcaatttccatgagaggtgactgaattccgaaggtagaatggccaagcgggggggggggaggggggccaaatattccaagagtcggcgaagattatcaatgcaggtctagatgtaaaatcccgagatctagacaaaactggatgaaattagaaggccaccagaactcttcaggagaaataaagaagattcttcgattgcaggcctgcaggagatgtatatcaggaaacgtgagggcccgggagcttagtcgcgaagcacaccgatttcgggttcgataaaccacgaaaaaaaaaagttggaggaaccaagttagagaatcgaagagataaatatgacaactgacaccaataccaagaatctcctgtccacttgctcggggaagtgaagcagagatgaaagaaaggggatgaagcgggtgagcggtctggaagaagccggcagtaactgggggccaatcacgcgtgacgcgcaagaaaatcggggaaagggggataaatgaaagaaaagggcttttagttctgtaccgacggagtatgcttcttctggtctgggacgccgtgcgatctacaccgtgctactactctttaagactagttgtgttgtggaagatattgatattgatattgtcgttggtctgtctcttaagttggatctacctgtgctatgaacaatgagactcaaatattccatagatatcacgcactcgctcggcgcatcgagttctacggaatatggttaggtggagagtatatactactactatagcgctggcccagttcgaccggcccgcttagattgatgagcggaggcaatgtatgatatccacagaatgcacagactttttcaattcgccagtgacttgtcacttgtaatcctaggcgacgatcttggcgaaccaaatgcagcttgaaacagggagctttgggactttagggggaaaattggttctatgcgattggggggctatattgtacaatacgatgtagatcgctatttaggcatttagcatgatctacgccttaaaaccctctctcttcatgagatttatgagactctgtgccacttaatttgggcttatctctcgggttctctgtctcgttctctttggaattacaatttagaatcttcccccaagtaatcgtatagttcgatcgatcgaaccaaccaggagatagcctagaaaccatgctgcaatcgactgatcacagttcgccacacgtgtaaaatagcctgtttttcccgatttctcgtggctgccacgttatggaccgctttaggccgaaatgcatggttgtctcgggaactgtcataaagaagggctctggaatgcctgtggaatattcaacgttcgatttgatccctcacctgcaaggacttttgtcggctgcagttggatcaattctaggcgggtctttttgcattcgctccactatggcgctgatatgctgaacacgtacgaatgcgtttgtctcccactttgactccctcaattcgagtactattggttccaccaaacttgacatgtggacgcagtcagctagtgcagggtttttgatccctagtcaaatgaaagaccagcagctagcaaccttagagggcgcccacggtaagcttataaaatggaatgtggaatgggtgaaccttgtcaactgggcgtcgggtaaaaacatgcaaaagataatcaaggggcggtttcagcctgctatttgactttcaagaaacataaacctgggataaggctgcttgtgatcgatacagattatgtatcaaatcatttaatgacaattatggtcttcagttacgtggcctctgtgttggcatattctctttcattttcagcacagacacaagacaagatatatttcggataattatgtttgtagatccctctatattaccttataatcataattaatacgctctaagcgtgaacggagtatctctggggaagataatgatgtattctctatctagctagtgccataggcggccggggtcacctgaccctgacgacggtgacatatggtagttgattaatggcttcatacaaaatgatacccaaattgcagtttatagtacaagtgtacccaaatatatatccgtgcactactccgtaggatgcaggaacaggaatggggtcttcaactatatccaatttgaacttcagccaaatcaggagactggctaacatggcggccattaccaaacttttctcgatccttttcacttgtcctattacttattccgattcaactaatttctttccaatgtaatattatggagaactagtgcacacatctgaggttgttggggtggtagatcggtcacgggatagctccttcccaggtttggcttcctcgattcctcaatgtcgctgccatttctcgttagaccttgtcatttcttcattcatgcaattatccccaatcattcatcatggagagcttcgaaaagtctcggccattgctgcagcgcccagagagctctagcattgacgttctagatttctctttcagcaagcccgcctcacacaagccctcgtactcgcgaaatctgatcaagcaacctaccattccccctcctggaattgacaatgccctatcttcaaaggaaacgatggtagaggaggcagggcacaaccatcaacttaccaggccaaacacgtatgtagatgagccaggctgatatcacggatgaacaccactgtccacgatgaactaacatgtggtattgggttcagccctctcaatcctcacagcgtcgggaaagaaggacccttcaagccgccagtccctgcgagacaacctgtcttttctcaaccaagacgactatcaacatcagctgagtctaacaaagacagcggtaaccagcctacagctggggatatagggaacttgggtttcggacaagaacaggcggtgatagtctcccagctgaacgagcccaccgagaccgatacccctaaagaaaccatcagccctgcacgaagggtcgtcgagtcgagtcaagagcgtgttgttgacattgagaggacgagtgaagctaattctgccttacctaagtcgccccaggtgccacatccccacagagagaggcaggacattgagatccaatattctcatgtgcctctcaaacctgtacaaaataagtctcaggggtcaaagcgacgacgtgcccctgagaaggacgcatcgtcgaagcagcaggcaccgctcattggtagcaaaaatggtgttcagctgaatgaggatgatctattcgagcttctcatcacaagaatgagacagcgagaggaaagcgagcaggcagtcgcagttatccaacggcaagtcacaaatgagaacatggccttgaaggaagagaaccttaatctgcaggaccggctcaataaatgccaaggacagctcgccaaaacatcatccgagtcaagatctcagcgcgcacaaatagaaaagtggaaggcgaaacttggcacattcaaaggtgtcctcaacgaactcggtcgtgaatatggcgcagtcctggaacaagccaaagaattgaaatcagccactatctctcttgatagagagaaaagcgagatccaaaacagtctggacgatatcaggttaagagtttcgaacagcgcagagaccattcaacaccaatgcgagagactttcaatttccgaggggacggttgccagcttgagggaagcgttggaccattcagagaaaagaggcgatttagtcaagacccagctatccaacgagaagaagcgaatcgccactctagaagcttacatccaaaatgagtctcagagccaattgcgaaacttggtccttgtcagaaatgaccagcgcaagatggccgaaaaacttgactctgcctatgacctgttcaccacatcttgcttcaaatcccaggataatatcctgtcaaaactgagtccggtgcttgaacactgtctcgcttcggttcaggggttgaaagagcagtgctctgccgagactttgaatgtccaggagttcaccatcagcgttcaagagactacatctcggtaagttccgtagaagtgtaccaaagaacaacacattttaaactcactataactctagtttcaactcattggctggacaggttacaagtgacgtcgaccgaggcacggaaatgagcaagaatgtgttccaagccctccaagaagtcattcaagccattgaaggcaacctcggtccgtattcgtcaattttcaaacagcttgctaatagcgagagttgctatgggagtttgcaacaaaagcttcagatcattgagcctatgctcgacagtctgggtggttctatcaaggccgtggggttaacagaaacagaccttgtgcgcgggttagagaacttcggtcagaagctttctgaggctcaaattccagcagggaaccctgttctggagatggagatcgccaacaaattcgctgaaaatacccagttgcaactccaactgcaagaaatctcgattgaggttgagtctcttcgaaagcaacttgccaacaaatcatctgaaaatgaacatcttcagcatgctttgaccgagactgttgctagtgaacaagcatctaagaatcaaaatgctcggctggaaattgagaagacggccttggggagtgagcttcaattactcgaacagagaattcgggaagagttggatgccgcaagcatcgaattgcagggtcagatgaaagctaaatttgaagaacaagtccaaggccttgagacagaaaaggcgaagctagaaagagacttcaacaacctccaggcacagcttgcaaatgttcaaagctctttggtaagcccaactgtgcctgacgagacgggttcactaacagtatgcagaccgaaaccgaaaagacagccgaggaggagcgactaaaaaaggcctccatggtaagcgatgcggatcatgatagtcatgtgctcaactgataggcgcagctcaacgaatcacagaaacgaatcgaggagctgaatgttgcttgttcaaaatatatcacagaagcaaaagccactgaggctgaatcaaacttattgaaaagctccgaagccggtctcctgacggaaaagaagagactccttgaacagcttgaacaagcaaaagtaaagaccaccgagcttgaagcgagccttgggctgaaaacagagtctgtagcgctgaagaagaaggcaatacaggatgtagaaaagagggccgaggtccttcagcaggagacggcccagaaatccgaagagcttgcagcaacaaaagaaagcctcgccatgctcgcatcacggtcatcggctttggaaaaggtcggggaagaagctgatgctgaaataatttcactcctccgccgggcccaggaggctgaaagttggcaagcgaccataagagaagggtttgcgaaggtgattgaggtacattcagacgagccttttgagcaaacatggcagaaaatagaagacatcatccagtcctcgcttgttccgtccatcactggcgatacgtcttgcaacaagcctcatgataccgggaatatggaggacagcaatcttcttacactcgagtcaagagaggggaaacatgccaatcgcttcgcggccaatgaatcaaataaggggcctttcaatactggtgaagacatgcagccagatggacctctagcaccaaaaagttttagcccctcgaaggctttgaaacagggtgattgtgctgaatctctaccgaaattccctgccggtcatggccatattgttccgttttcaagtctgcatgacagactttcacgggaaaatagcatgtcacttttcaatgacccagctgagctcgagatgctcttcatgtcgactccagatctcccggaagcgttggtgccgaaggatgcctccaagaaagctcccgaataccgatctgttccaggagatcatctgagactaagtcgagatctcaatgacctaaaccctgttctcgggacacaacctcccggcgccgatgacaacagaagcgaaagaccccagtcgactcttgaaaatatcgacagttcgtatgtggataaacatgccaaaaacgaacggcccaacaccaagcgtaaagtagtcaacttcgagggggcgcgttttatcacccaaacagaggttggcaaagctagacgaatgtcagatgcaaccgacaacagctctggaagagagtctgaaagtaaggaaataaagagaacgcagaaacggacttacagccgtcttcgccagtctgtggcacaggaggagacgggttcaattgaaacaactacagagatgcagcctgccaacaaagctttggtaggcaaatctcaacagagctcgacggataagactgagcactcttcgaacgcgaacccaaggccgtcgaagagagcacgaaacgcaaccgacggcccggagcgacgactgagtccgaagggtttggcttcaggtagcagcaggggaaacacagccggccaagctagcaatatgcgaggccgaggtaagcgccgcactcgaggtaagatacccaatgcctctctctaggatagctctagctaacgattagaaggagaccgttacagtcagcgcttcagtcaagacgccggctgagcacttcagcgtgagaccggagagaaataccatttctctattgttactctaaccaagttgagcaaattctccatattcactttatcaaatgcaaggtgtgtgcgacaagtccatatatatccagatactgggttagaaagatatgctgttgtcatggacggatggacgaaaagagccccgggcaaggcgcatgcttcggaaagcgatgaagtggaatgttgttggatatttattgtagttttattgaggtacccaaagctgtattgctcttaacgccaaacacatgctccaacaaaaggaggtttaccgcagaagatccgagaaaccggggaaatcacaatttcccgcttgtcttcggtaaaataatgtacacataggggtcgttcccctgacacccttatcgcatttccctagatacgcgcaaagcctgaaaaaccgttcgacggcgtatcgggataggaattgcaaagaaacgcaggctcgattggaggaggaaaagaagagatcgaaatcgaagtcgtcatcgcggtcgagaagcggatgtttctcaaggcgcagaacaatcggattgaaaagaaaagccgagcggaacccatatccagaatcgaatagcttatttattctttccacccttggtcgcctcaaggaaaagcacctgcttcttaacgacagggtcgtacttcatcatgctgagaggacgatggacacggggccggatcatcgtgcggtagtagcccgtcatggccatagaaatcagccggacggcaatggtacgggacttcgctgtgccgggaaaaagacgacgttagccatcagccgcaaaggaatccggcgggttctcgaatttcgctcccagcgcccgattcacatcccaattgcttatggaatggcgggtggatcatgcgattgaactctcgggcttctcattccacgtacctttcttggccatcttgggcggcgtctcggtatgcttgatcgagttgtctctctgaaacaatttcgaggtcggagttgatcgtttcccgtcggtcacgtggagcttgcttagtcattgctgtttgggccggcccgtcaagttagaggatcaacccgtagacatctcgttggcggattttgatgattattttaaagttgctaggcaccaacgtgtgaataattattctactatacatataatccggggcttgtaagactgattaaattacccatcttccaccgttttctgcaacatacattagatatctcgtctgggacctatggatggactagtcctgccacccccctgccaattcatcttggatttctaattgattttagtcagtataataacataggattacggattactctgtactatgtttggccacctgttaatattgatcttccccgttgaactcgccaactcaatacaagctttaaccgctgcctaggtgacattagtagtatagatttcctatatgtgggtttgagctgtctattcaagatttttcattatgtttgacctgtatttccaactcagaaagttctagctaagtttgcatgagtgtcgtttacatcacagcatcgccgatgtgacgatatcatgatatgcaatgaccttcagagctgaaaatcttccttcagttccaatttcccgatgataccaaaaatcgtggcctgatattatagctattgtggctgaaaaacattgtatttggctcttcagagttagtatgttttacattttacaggactgagagatcaactgcatagcgggtgatatgagcgaggtagtgattactagtcgctaattgatgatctttcaggaaccaaaggttgattaaacagcgcaccaaacccgaaaacatattatcaagatgatctatagccgctcgattccctttgtcctttttgccttgtttggcacaggactcacgcaatccgtgaatggcttcaactttaacaagccaaccggcggccctccaggacgctattttgctgctggctcgtctatccccgttactgctttgcagagcgctgctgcaacggctagtactgctgtacccgatggtacctatcctatcaatagagaaaatggagctcaggaagttaccatccatagcgactgggcgaacttcaatcaggtagatactctcactagccggctacttgcaggatcaaactgattgataatagggtgcggcatatgtctggatcgcggatatggatgtcgactgcgacggtattgactatatgtgcaaggtaggtgattattattgtctgtctgggatattattgctaaccctatggtgcaggaagacgcggacggcctgaaccaaaccaactttggtgctttggctgcctatgaagtgccgttctttgtgattcccgacaggttcggaacccagtacgcaaagcagcttcctggaaataacatcggtgcagtgatctggtatgactttccttctttggtggatatttcagcggcttcctgttctaactaaaagctagtgacggcaagatgttctacggagtttacggggactccaatggcgctaccccccaagttatcggcgaggcctcgtggttgatggcccggacttgcttccccaatgataacttgaacggaaacaacggccatggtgatgctgatgtgacctgtaagtctgaaaatatatatttcttttactttggcggctactaatccaacaagatatcatcttcactggcaacaactcggtactccctagcagtgctctcaacacaagctatgtcaccaacttcagcatactacgctctatgggcgacaggcttgtgacctctcttgcgcagaacctcgggctggtaaatggagggtcctcttcttctattgcaacgacgaccgctggctccagccctactggaggcttctgagtgagaagaaaattgtgctggtaagtaaccttcagctcatattcttacttcatggtcactaagtaattttataggtgcctcttgcaagaccgagcatggcagtcaagtggtctggaaaagtgggaaatgcacgaatgagtgattgcgacctggtagctatgggggatttgatctaaagggaaagataatataaatggcagagtagctgtatgtaccgtactcttgaccaccgcgattttgccgatcggggtatcttcgctctatggggtatgcttaataacgttcaaatactgctttaagtgtatactcgacgattactagtgaacgcagtatatcatagacaggagcaaggaaggcgatcagtatgaaatgtattgagtgaactggagaactgactcgggcaaaagagaacacattttacgtttactcctattgaaaatatataactgtgtgaacagactaaattgtatgatttgtattcgatgtcacttactcgttatataggctcgctctattacctttctaatcaacattgaactcatcggtccaccattggatcatggttgatctgacctacgctctcgtcttttgaagtccaacatttacctcaagatcttcacccttgtccaatactctagcggattccagtctttgccccaggtagagttcacgagtatttcaacccccacgtgctgctgtcgccggacggtgtcttcgttatgtcctcatccacggaatctgcgatcctgctgttcaggactgatgttgtcgagtgccttggattgagtatctcgatcggaagtaaatgcattgagggccttatgttagagcgagactgtttgctaatgcggcaacaatgaaatcgcatggttcagcatgtgtgagttaaggcgcgaggtcggtggatgaatctgtgttggcagtgcctttgattgggaattgaccaaggtcaggggcataggcatagagtctaagtcgttccagacctccaacatcaattgcctactgaatatgagtcattaacatcagcatagacgatgagatgtttatgcaaatttcattgcccatcgatccccgttataaggtcatgagtgacgtgataagaatagatgggggttaaccgtgtcacaagcctccaatgaagtcgccaagttcggccatcgtgccctgaccgttctatgtatagccgaatatggagtaaggggtaaaatgttgaggagaagtcctccaatcatgtgatagttgacgaaggcgtgcttgtttgttgttgcggtcacctggcaagtcacctgaagtcacctgaagtcacatgaagtcacctgaaagtcaaaatgcggggaatgttcggcccgagcagccaattgggcaataatgcctcaagctcctgtggcaatgacttcattgtctgcaatttctgcaaaggcgcgaaaatagaacatcctattaaagaatagaaacgtaaatgtttccaggggtcacttgatgcgtttgcgtgatattacctaaaacccggtttgcgtcggggaactactaacttgattcagctgtgccttacgttttatgatcgaatctgagtctagaagcccataattttacgtgatttcccaaggatcgccaagtaattgccgagaattttgatatcacgcttgcagcgtagttggagttggtccgaatggcgttataatgatctacccgtggacattcccccgcaaaatctatataagagagatgtttccccggacttgagccaacaattcaattcaattcgattccacgcaatctccatctgtcttaccaccttgggtcctttatcctactcccaactacaattttatgtgagtaatataggcatctccctatgtctgacagttactgatacaatcctcagtcaatgacccagagtcaatcctccttcaccatggctatccaactacagcgccaggaacagagcttgaaatgcgagcaatgcggactccctgctgtgagcttatccacaagcccaagctccaatgatgctggcagtcaggcatactacaaatgtgtcccatgcaatcgcttcttaggcccttgccctcgcaacacatcaggagctagtcagtatggtgacagcgattctgaatcatcaggctcggaggaccatgtacctcgcggtctccccatcatttctacgaagaagcaaaagtccaacccacacccggctccggagttcgatgaggactgggaggcgaattgcagtccaggcttcatggtctcgagattcaaggcgcaaggcagggaagtgcttctctggccttgaagaatgatgcattttggttttttttgggaatagcgagcattgtttcatttaccaagtgtttatactcggtcgttacctgctaaggtgacgataagattcgagtaaaagtttatatatatcactaataaggctatgcctttgagctcggaatacagaatgtttgggtacctgcctatcagcgagattcatgaagttgcaaaatgtttacttctgggaaaacaaaactataaatccttcaacttcttttaaaagccaagtctttacctcaataagcttattccttctagagattctgaatattgctataacctatgacagattttctgggttcaatagcttgccaatgatctgaagctacagtcgcctacagtatcaagggcatcatcttcgatatgcactcagtacctctggtcatcgtcagagccgaaaatccagaaagcttcattgagctctgtatcccagaccatatcagcgctctcaaaacgaatttatattcaaacctcttgattttaactctttgcctattcgttcaaacatatttgggctgttgtcttgagccgtcaagtttatactcaaaacttattcaacgcaatttcatcatgagtactttcactttgtctcccctccatgaatattcatttgatctgcgaccatgatctctttctctttgctagatagagagttatcctagtttcaagtttcacctactcacctctctctcacctcacctcacctagcatcctccactttgtcaactttaccacctgcctatccccatcttcttattagtctaatcattttttgatcgcccagatggaagacggtacaagcaacgatggcaatcatttgcccgaatcacaccctgatacgactacaacctcgagcactcctaccattcccacgccctgtggtataggaaaaatatcaatcgagaacatagctctgcccgaatcaatcatcatctacttgaaccaggattccagcaccttacagattatggggatgctggacaggctgggcgctccagcaaaactaccagtcatccaccgtgcagcaagtcgacttgaagctctagctgcggtgtgcaactcgaactttgcagctagaatactactgcaatcaaccaatggaccgatttcggatatagatgccgtagctctgtgggcacaaaccatgcctgagctaccgcagccatccgaatattgggatgtcgtgttagccttcctcttgtcgaaagaggattgcatggcgctgcgggacgcacttcgattcgcagcaggcttacaggcattcaatgaatcactccaggagctagaagatggactggaaaaaaggctcttcatgcagctggcggataaatggtccgcgatgatttcagaggaagacagcatagaagacacggaggatgatattgaagacgacgtggagtaattctcagttggcacaattccattagactatcgcatttctacaatttagtgacctctccacgcataatcggttcatgtgtaactgtaatcacagtgtcttcctcctcgcttccttgttcctctgccatcgttatctttctattactccttttctccatgatcataatccaagtgacattaaacaaatataaaacactgattatcgtggcctataaagaagatgactgttagttcataagacgtgacaatgctgagaaacaatcatacccaaataaatcccccactacgaaggtgtatagcggccaacagccggatgcctgattttaatggttttatagcctaattaggactagctcttaccaattttagaccggcaggaaattaaaatacctgaattactatgacagatctcctagtaccaaattgagaacagcttgaaagttgaaacatgaagctattcatacccccccccccccccccccccccccccccccccatctnnnnnnnnnnnnnnnnnnnnnnnnnnnnnnnnnnnnnnnnnnnnnnnnnnnnnnnnnnnnnnnnnnnnnnnnnnnnnggttaaaaattggaaaaagaaagtttgcataccccccccccccccccccaaaatactatttctcatcgatcctaggcgttaaggccctccaactatatgaatctcctgtatttaaagccattcatacccgccgtagtcccgcactttcccggagaaaagctaatagcgcaactgacaccaaggcccaaaacggttggaaagccaagcctggatttcaacacaaagtccccattcctaccgaccgtataaacttcaaactctccgtatcctctggctccggcgtggcgaatatttgaatgtagttttgagaattaaaataggtagaaggcatttgaattaccccatggtaacagtttcgtctcttcgatgtgtacttacaaaagatggtattgagcggtgtcaaaggcggtctaaaactggtaagagctagtcccaattaggcgataaaaccattaaaatcaggcatccgactgttggccactatacaccttcgtaccccacggaaaccaggtgcttttgacacaggccaagctaccaacggcaccaccagactagtaatctccccaagacaattgtaggaagcaaaagtaatcgctctgacctccaaatccccagcaagtccctccgcagtccaggcgatcagtactggaagtgtcccgtaagaccatcccactgatatataagcgaagaacttgagaccatcggggatatcccaaattgcaagtaccaggttcgcgaaaatgcatagaatcccagacaagattataggctcagagcgagatccacgaatgtcagagtagaagctcatcatcaatgcgccagctaccgccgcgccattcgtgacagtggataagttgttcacaagagcgacgggatatttatttggctgagagtcgagccagagaataaatggtgtggcttcgctgtatgtcatgttgcagaagatgactagaaggagcacgaaggcgtagaatcgccacgatgtgaagattcgtttgatgattgttttgttgagacctgtagatggcttgaatccttcttcctgtagtcttttgttggcgagggctttttgttctgcgcttaggaagcgggattttgtgcgctctggcatgtcgggaaagattaggaatccgctgtgatatgttagttggatattagagacttttagggacttttcaataattccaattgcttacatcaaagcaatagggattgtgataattgtgcagataatgaaaagccatctgatcatagtaagtattggaatgcttgacatgcggtgggaaactgacctccaaccctgtaaaccatgatgattgttgagatgtgtatatgcagcagcttgtagatatcctgcaaacatctggccgatgggatttgcaatccagaaaagtgcattccgacgtcccagttcttccttcttataccatctgtacgcgcaagtcagcatgctttgaatttccgatagtcgggattcaacacgaacgaattgactacatggaccaagcccacataacatgaagtagcgctcaacccgacgaaaaatcgcattaccactagctgctcgtaagtttgcacaaacgccgttccgagagtgaaaagaccccaaaagatctccgcagctgggaggtagtattgcgctctatgggaaatatcagctggaagttttgtatggccatttacttaggttgcttacgggtatttgatcaagaccatgttgctggggatttgaaacacaacatatccaacttcatctggatagcaagcagggttagcacaacaatcaaactgccgttaattcattggagacaatagaaaaagggcaatgttcttacatgcagcatttatataattcaatctattccccgacagatcgagatcctgtttcatgccagaaacatatgcattagctattgaatgtcagtcaatgattctcgaaacatgcatgtgaggtacacatactcaatgccgaaacgtctagatacttgacaaaaaatgacaaacaggcatatggaagaaccagccaatccaactttcgaacaagttgacgttctaccaatggcatactggcagggaaccatcttgtggcgctctctatacgtgagactaagcccgccattgttccgaaaggatgtgaaatcttttcgaacttggagaatcaatacgaaaccccggtctttgtatattttaacgaatatcatcttttgcatagatctaatctcgcgtcttttgtgagatatgaggccatatggcatcatacccctgacacgaataattgtcgccaggtaccgatatgttgattgcgccatatatcactaaaacaacaccacgagtatttcaaagcagactcaacggactcatatttcaatatctgtactcaattcaacctgtcggatgttttggcaagagtaaatgacgcgatcccgttgtagacaacgtattcggacttcttccgctctagaggggtagcaatgcttatctcgcttggcgagaaggcattctgatacgatgggttgagtattcgtgctttcttatagagatgacagcagatgagggttgagcggggttgctctcagctggagagataaataatatcgacatatagcgatatctggactttgaaaattgtcagagacatttgatctaaccgcatatatctaaaataaaatcaagtcttgagcttgataattttgaaatgtcagctgaaacctcaccacccaagcggcggatatacctcaatggcttcgacatgttcacggtaggccatctttccttcggacagtggaagaacccttccgatcggtcagccaccaagcgacgcgacctctcctactggacgaatctcgcccagatactggagaaaggcgatttcaatgcgttgttccttgccgacacctatggtctatatgacacgtacaaggggactgcagagcccgctattcgaaatggagctcaatatcccatgggagacccttcgatagtaagctagctgtctgatttttttcgatccagttgggttgctcatgatgtatcagccaatctctgcaatggcctcggtcaccaagaatctagggtttgcgatcaccacctctacttcatatgaagctccatacgttgtggcaaagaggttctcgactttagatcatttgaccggtggtcgattcgggtggaatattgtgacctcgtggaaggaatctgctgcaaaggccgtgagtattcacattggaggatttttgcccaagactgacatctatagctgggattgccactggtagatcacgataagcggtatgaaattgccgacgagtacctgaccgcattgtacaagtaagcaacagtgaaccctggatagccatacgaattactgacctgcaatagactgtgggagggcagctgggccgacgatgctctccaagagaatgctcaaacaggcgtgtatgccgacccaagtcgaatcaaatacatccatcaccacggcgagcattttcaattcgacggccctcacatcttggatccatccccgcagcgcacccctttcctcttccaggcaggcacatccccagcgggcgtcgccttcggcgcgaaacacgccgaaggaatctttgtctccgccccttcaccgcacatcctcgctccacgaattaaagccatccgtgaagaagccgccaagctcggccgagatcctaaatcagtgaaagtattcgccatcctcacgccgattgtaggccgaaccgacgaagaggcacaggcaaagtaccgcgaagcactagagtacgccagcgaagaagcaggacttgcattcttctctggtggaagcggtatcgatcttagccggtttgatctagacacgcctattacaccgtcagatgtgcatgttgacgcccgtgttcattccacgatcaatacactctcctaccagagtcccgacgtgcctgaatggacgccaaggaatatcgggaaacacatctcgattggtggggctgggcccgttcctgttggttctgcgagtaccgtcgcagactttttggaggaatgggtccgtgtggcggatttggatgggtttaatattgggtatgtgcagacgcccgggactttcgaggatgttgttgagctcctggtgccggaattgaggagaaggggggtatacgcgccgttgggtgagagtggtacaatgcgagagagggtatatgggcccgggcaaaggcgcttgcgtgatgaccatgtcgggaagaagtacggatatgaggtgtatgatggccattagtctagtcacagggtggaatgcaatttagattggtctaatttgaaatgatcccgcgaaagcagatagatacatggatatacgtagtcgaggatcagggattttataccggatttgatgaattcacactcatttccactacttcgtactcaaacaaagaatgtcggagatcaacatagaaagaaaacagccaatttaaccctaaaaaagaagaaatgactctcagctaagccctcaggaatgtgccaaggcaaaccggagagatttcttccctcgcgccagctgaaagactctcccaccaaggggctggaatccatatggccaggtgaagatctatataattggcctgattctattgaggcttgacgctaatgccattagaatcgggtattttggacaatttcactgccaagtggattcgcacatatcatttcacgatgcacgtttcctgagattgaaattgagggcatattgacttcaccttagcgctttatagatctcaccttgtgtcaaattaattaatacgagaccggaaccccccgattggagcgaaaccattgcatcttgaactaaatcagcagatggcatcagttcactcgcagggggaatctccacaactggacggacaacatcgaggcgtttcttggcggtcgtttcatctttcccgtactcctccggactcatcctcctcaatttaatctcccatttgctttgaggcatcgctttgattggtccgatctgcgacagaacggggtctccaatttgcttggcttcgtttaacgtccccccgctagtggttcggtcagctcaggcgatctccagccttatgtctccggttccaatgtggaaatctgaaacagccccgatgcagggtatgcgccaaatacttctcaacgccatttccaagggagctataagtactagacatctactcatgatgttccccattctatcttcaccatctttcagtcgttccttttcctgacacttgctgggttcaagttgtctatcccttcatttctacacacacattcttttactacactcctttcaacttcaaccgattttaccaaaatgatgaactctacccaaacttccggctggcaggtcctagtgaccaagagaaagctcctggtatcctgcgttctgggcctcttcttccttgccatcgggatggacctccgagcagagctcggagctggacacaatcagaagaagatcctcaagcgtgacaccaccagcactagcgatgccaccatctggcagcctgcggcaggagtcaagtggcaaattcaacttgtcgacgccgtcgaagacaccagcgtcgatgccgacatctgggacatcgacctcttcgacaacaccgccgagacaatcaccactctccagggcaaaggccacaaggtcatctgctacttctctgctggcacgtatgaagactggcgttcagacattagcaagttcgacagcgcggacttcggcagcaacctcgatgactggccaggcgagcgctggctcaatatcaagtcgaccagtgttcgtgcgatcatgagctcgcggctggacatggcgcaacagaagggctgcgatggcgttgacccggacaatattgatgcatatgggaatgagaacggtctcgggttgacagaggctgactcgattgactttttgactttcctggcctcggaggcgcactcccgtggcatgtctatcgggttgaagaatggcggtgacattattggctctgttattgataagatgcagtggtcggtcaatgagcagtgtgccgagtacaacgagtgtgacgtctatgctgccttcacggatgtcaataagcctgttttccatattgaatattccgacgagactattgagtcggatagctctgacgatacttctgacactgccaccacgacttccactgatggcaaggctaccgccactgcaactgccactgttgctgtcatcccttcttctacctcagctaccgccgccgctgcaacagccactagtgtctctgtcatccctgcttctacctcagctaccgctgcttctgcaaccgccactagtgtttctgtcatccctgcttctacctcagccgccgctgccgctgcaaccagcacggccgctgatgacaccaacgatgatgatgaagatgacgaagacgacgacgaagaggctagcaccgataatactaaggagaaaaaacaccgacacggtcacggacacggtaaccacaatctccgagctagagccgttctctcctccactttgaaaacatcagcttgcaacgcagccaacgccggcaagttctccactgttatcaagaacatgaacctcgatgcctgggttgaatattgctagactatcgattcctcgggggattgcttcgtatggcaagaaatcaatatgttagctggagatagtcgtgaataaatgactgtcgctattgtatacacttcaaagagacatcttagaatatatacaagacaagtgctacaattgagaaagaactcttgtctttattattggtctggtttgatgcgtagaagggctcagtactcagtatattgatgatgatggcgttgttctgtaggaggaatctcggtccggtggactaggctatatctaccatgaggggtcgcatacatagatatcagtcaattatcttcctcagaggacatcgcactttaacactaggttactcaactaagtaaaccctcaatattgcctgatactctggactgctttccacgcatcgccgctcaacatgacactacatgacgagagctctcaggaaccagagcagcttcctcgggagaactgggccatcacgccgagtggagaagggaactgttagatgtactaaggtctgttctgcgctgcgagtgcgagtgcgatgctgggcgccaggaataccggaatacctggatgctatcaatgtcgatgtacctatgtctcattctcaaactccactatactgacaaaagcttaggactacgagccgctaccaaacgtaaacccagcagtctccaggttgcttcatgcctcagttgaaatcgtccctttgatcttattgtcaataactgtcagagattctgcactgagattctgcagcgtcttgtgaacaatgggatggatagtaaccattctccagtacatgatccctccttacacaaacaaattctcagaaaccataaacttctcgtccctagcattggtttcctccggaatcacattagcatcctgaacctcgcaccccttcagcacagatccacgaccaatctgagctcggcgaccaatcacacacccggttaattgagccctagcctcaacaacgacgccctccatcaaaacgcaccgaatgatgcgggcagcactagcaatctggcagttcgcaccgatcacgctctctttaataacagcacccgatgcaacaattacattctcaccgagcagacaatccttctttgtaacgttgctgggcgaagccacgccttcggggtaggcaactttatgggcgtgtgctagaggcgacgccgccttgcgaccaacttcctcgatagaaggcagttttgcgaggaaaagggatgttgaaagcaagacgccagtgttatcgacccgtcgaatgaacggagttgatcctcggtggacgtaggctagaatttgcggcagttcgatggactggtgtaattgctctggctggagttcgcagctagaacgggtcctggtagtgctcatatccttgatgtcgattactttgtcaacgaatgcgccagtatagctgctttcaggcgtaatttctgtctcctgggtgaaagtggtgtcttcgttgaagttcttggtcaaccctagtttggcgccgagacctttctgccatgttgacttggcccaggcgccgaccagatcctccctaacggatttcagtttgctttggtggtggactaggtctttgacccaataggggaagacgtagacatgggcatcgcggaaggtggtgagtattctgatgcgcggacaattttggacaagggaatggcgaaggagaaggccttggtcttctttcattttctccttgattgtatccattggtattgacatgagaagtttggataaactgaaccgtgggattaacggtccatcggggccgtggacaacaggttcatcattctgctggagtggtgcaatagctatgaaatctgttccttctgcctgaatactctcctctcggtggtctgtttgatagtacacagccagaccaccggggcgagcttcccgctggcgatcgaagtaggaattggttggaggggatgcatgttgagtccctcttgaatcactaccatcgttgagggcatacggactggaaatccacgcctcgaggattgactcaccggggatttcacagatgaggtcacaaggaaggagaagaaaattcgtggtgatacatctctggacttctgggagacgaaggagctcggcagttcccattgtcatctcgaggtccttcggtgcaatgagcgagaccgagggcgagtagaaagatgtaagatatgggttctggtccaaagcagcccgaagggggggaaaagacagtggaggggtgatcaacgtgatatctgggatataattagccaatttgattaagagattgagatgggtctagaataaagagagcattcgggcttaccagtgacacctgatcgcctgcaaaagtcgatggcatagaataacataggtctgtttgcgacttgaatgagacactttggatactcctcaggtgtggaggtgaatgtattgagtgaacctccagggccacataggatgagggcctggaagtccatgggaccagcatgtggcatggttgtctgagtgaagggttaagcaagtgaggttaagaggtctttaaaatgtaattttccttgggatgagcgatcaatcgcgtgacatgtgtaagacggagagattgttgagaagtttggtagagggaagacggttcacaggaagagctgatgggggcagcctttaagagacaacaagtcacgtagttgcaattgaccggtcacgggtgaaaaagtctgaagttgtttgtttcataagtagccaaacctctgctccatcgaaatagataggtacatgacgaccgcctttcgggtggtcggtcatatcgatattgagttgtcaggcgggattaagtgaacggcaagactcattttgagtacgaccaagcattgatcttagacgatatagcttcggtgcctttttggtgcctttttagtgggtttgtaatagtttaacactctatattcaaggcttttatatgtccacaaccttcactcgcacaatgttttgccaagttctattttgctggtacccagagctatagtttgatattactaagatataaaactatttcccagttgatacgatttcctagagtgttgcagttttcaatcaaaatacaatatgggccgagtttatgctttgccccaaactttacagaatcagtacctgaaattaatgagctgatttggaaagaaaaataggaaaaggcaagaaaacagactaagcttttttatcaagatactggctctatatgcgttggttgagtaaaagacataaactgacgtatatagatcctcttcatataaatctcaagtgccatacccagaacaaggattgtctccccaaccatcatgcatcttcttcaatctcagcggctaattcgttctttcgatccttccgccagacaagccaccacgaagccagaatgcccgagatagccgcacacaggaagcaaagacagataacatatgacactcgatacgtcggtccaaacaccgtactgtatatatgaggcccagcgatgccactgaactgggccatggcattcgtcagcccaatacccatacccacggccactgtaccctcaagcgcacgaatacgttctggccagatgacagggtatgcagatcccgcacaagcggtagctacaatcaaagcgaggtatttgacgactgagttcttgactgtaatcaggatgatatagcagatgattgtcgtgctttcgactgatttgttgtcagtaggaactccatgtgtaatgcgggaattaatacttactcgcaacagcggtggtccagggtctgatccatcctttgtgtagtaaatacccgagaatattcaagaagaaaaagcatgcgacatatggaggctattgagtatgagtccggttagcgatgccttgcgtattggtgtgtttccctagattgattccaactcacaatattcatcagctgtgatagagcggttgtggtaaagccaagctcatagataacagtaggtagagcgtaattcactccaaatccgccaatgccatgtccaatccagtagattgtgaatgtgtacagggtcggacttgagagaagtgttttgaagtccccccagttccagcttttatcatttcctgagggtgctgtagaggatagacggcccttgaggaacgttctctcttcttcggtcaacattcgggcggtctcggggtagtccggaagaccgaataaagctaccacagatagcacgattgccggaaggccttcgatgacaaacagccatcgccagcctgaaagaccaccggccccatccataaagctgatggcatatgctagcagcccactcaatgcgccagatatttgaccgagagagtagaaaagggctatcctccagcgcagctcagatggcttgtaccagaatgccatgtggtagagcacagaaggatagaaaccggcttcagccagtccaattgcaaatcgtacacacatcatccccggaaagtcctttgcagcaccagcagcgcaggcgcagataccccagcccaaaatcaacacgaacatccatctcgaaggcgtggcgcgtttgagaagaatggtgttggtgggctcgaaaaagaggtagctgtaggagaagatggactgtgtccaggaccattgtgcggcgctgaaattgagctctttcttgattccagtgccggcttctaggttgatgattgcggcgttggagtagttgttggaatcaatgacacggaagatatatacaagcgagtaaaacccaacgagccagaaatctatttttcgtatcactctcttctcgagtttggcgttatattcattgtcttcgcgattgatctcattgggcggagttgaaggtatgctggaagtaatgacttccagctcgtcgcggtttcccgaagccccatttnnnnnnnnnnnnnnnnnnnnnnnnnnnnnnnnnnnnnnnnnnnnnnnnnnnnnnnnnnnnnnnnnnnnnnnnnnnnnnnnnnnnnnnnnnnnnnnnnnnnnnnnnnnnnnnnnnnnnnnnnnnnnnnnnnnnnnnnnnnnnnnnnnnnnnnnnnnnnnnnnnnnnnnnnnnnnnnnnnnnnngggtgtggaagttatgctgaaattaatccctcccagctcgtcgcgcttctccgaagccatattgtcaatttcaagatccgcttgatataggatgattgcttagaataatttcatctcattctgcagtcaaaacgcaacttattttccttgaagcacctttatgcttatgtgttacttggacccctccgttctcggcgacgcgggttattagggcaaggtgccatgatagtttggatcacgacatttcccctcccaatgtgaatattcgtttgattgaacctccattactcattattcattcggattgcggcatgcatagtctaaatgctataattgtggggtatggatattctcataacccccataagcttgacgcccatcatatataaatggacctcaaaataagagactaccttgaggtaccctatggtatggccttaataacttgctctgtactatttgatttttattgaagcagtcggtttcaatgtgtaactatgaaaatctaaggctcgcttaaggttttgcagagtatgtacaaaagcactcttactgacaaatcagacaggttaactagaccactgtgctgaccggaggcgacaaaaatgctcaggcgttgaagacctactctgcgattgtccaatcactggggtttttattatctcggggccttttggtggcttgtctaagctccatgctgagtggaggtggtctaaccggaactgtagcttagctatgccatttcttggtatctccgcactgtagccactcttacccactcatatacgtggggtccgaagacgtcttctgtccgcagccgttctggcagccttcgattgcaccaggccattcgtgatatccgccccgcttattcctgtcatcatcttgctcgtttggtcgtttaacgtggggattctattttatcaggagcagtgtcgtcgtgcagccaaaatttgttctttcaaagatgtagaaggattctagcgatgcctggctccgtttaatagtaggaaagtccatttggattggggcggtcgtcggatttgcaaatccctaggagttcggaggtgaaccgagcctcgtagagatatgtttcaggtcaacctgaccctttcctcggattctttcatttccagacgctgtctcatccagtttctcgtgctagctccttccgtgttctgatattcagtatgaggctacgcatgacagccggattttgccttgaagaaactagtagtttcctcgggtatgagtttaatgatttttgtatgaactcatggatatctgacaaggctgctaatgagaaataataaagctgccctcagatattttcttatactaccaaaggataggttgaagagaaaagcagagcactgaaggtagcccgattaggtcaattgtcgtggcgatcacaaaaccctcgtaatggaggattgcacaaacattgacaaatttggtctatcagacatgtctacgcacattcaaatgtgatacacaatccacggtctcaaattctattctattgagtcagagtttgattgactagttaactatgattcgaccccgtttcacggcacgataataccgttgcatataacgccatcctgagcgagcatgataccataaaccccgcatctttggaatagcaaagtgtatggcatagagcactataagagtacattatagataggttttattttgaattaggtatacaagtatactcttctcgcttaggatatcatccttcatccctatcctaaaacaaatatggctccctcagctatagaacaacaaatcccaatcgaaaaggccaccatcaaatcatggagccgacctgcgcctactaacgagaagcttgattgggcaccactagttgagatcgatctttctcgtttcgacgaacccggcggcaaagaagatctcgcaaagcaattgtacgatgctgtgacacgagtcggattttgggtagttgtcggacacggactcgatgacgagcgcatcctccgccagttcagtatcgggaatgcatttttcaaagagaatcttgaagaaaagcgaagcttcgaatgcaatttcgccgaaggggagtatttcggctaccgtgaaaactcaaggtggattggagaaacgggcgtgaaagacaacatagaaatggtacgaatttacttcactatatcgtggattgaatttgactaacatgtccagctcaatattcccaaagctattccagaatgggatgatgttcccaaacacaggatcgtccgtcaaaactacgacgagattgccagcttccatcgagatcttttcgacaaggttgtccgcaagctgtttgtcttgatggcgattatcctggaattaccggaagaccacctagttcaggctcacgcctatgataagcgttccgatgaccacctgcgatacatgatctacaacacgcgcactcaagaggaatgggacaaggcacagggatataccaagggcggtcacacggactttggcagcttgacgctgctcttctcgcagaatgttgcgggtttgcagatccggacgtcggatggggaatggaaatacgtgaagcctgttgaggggggcattacgtgcaatattgctgacacgttatcgttccttaccaatggcaagtgctcatatcagttggtgcgacaaatatctcgctaacatagggtgacaggtttcctcaaatcgacaattcatcgtgtcgttacacctcccagagatcagatcgatatcccccgccttgggttgctctacttctgtagaccgggtgatgacaccgtgatgagaaccgtgccctcgcctttgcttgaacgtcttggtcttctaaccgaagaagacaaaagccaaagcaagcctgctcctaccgggactgagtatgttcgagctcgggtgcgggatgttcatcataaaacggtgattgatcgtcgggaaaacacttcgtttgagttcaaaggactgaaagtgcccaactattataagtgatagattggtggtgatgagaggactgagtttaccaaattctatttccatgcctatttctgatagtgatgaggtggtgatagtatcaggagtcgagaaaaaaccagaagatgtagctggtgactctggtatatattacctcgtcgacaaggcatcatattatcgatatcatctgcgacaggtcatattcacgtggcatagacactttgtacagatgatatgagcaaaggataagatttctgtctagcctcaggcacatgacccaagcacatcagccacaaccccgcagtgagtcatgtatagaactgtaagagcctcagacaactcggtaattaaagtatgtcagagtgtggatatcatgatcttcgcagcctggtcaacgtggggtacctcactgaactgtccaactatgcttaatgaaataatacgatgtctcagtacatagtcatgcattctatattgatttcctggggactaagtaattgtttcagtgatatattcatattcaattcaattatctacctaatcccaagagtgggagctatctaagagtgtaaggctcacagccttgtcccgaaaagggcgcattccaacgcagcatatcaacgacaaaggaaaattgacaaaagaccaaatcgatcgagacaagcttctccacatcaaaatgagtcacagaaacagcagccaataaaggcagtaaaacgaaaaaaatacatgcatgaacatcgtcgactttccgcatccgtgattggccaatgtctccacacctgcacctccttccgggatgactgcagcaatgcgacttggccaagcctgcagataattgcacacaatcaaaacaattgatcgagtcacaatcaagtcggggtccgagactgggaggtcccgcaaatctgggaccccgacatgcactcgagtcaaagatcaaagctggaaaacagaaagtgaatttccgagggctcatccggcaggccctatcaatccagactatcaaagactagggtatggggggttggggttggggttggggtaggggtatgcctgtaatgtgctaattccacatcaccggtcaagaccgtctcgcggtcagatgggtgtgggcaatcaatgcccatcgcgagtgaattggggtttcttcaaagcgattgggttgggggttgtgtataatcgtaatcagaaaacagagtcggaataccttgccaggtacagacaggtatacgttcaacggtgcttgggggagccgtcaacgtaccaccgaggagtctcgtagtggcgctccacacgctcttgtcggtcagcgccgtacaatgacccacggctagaggatgggcggctgggagatccgccgggcgagcggtacatgatggaagtaggggaacgagaaaggcgaggggccctctcgacgagctggtaagtctcgggggacatggaacgaggacgagtctgcttgctgctgaccttgcgagctgtgacggtgtaggtccggtcatagctcgtggactgggtggtttcgactggttcctggacgacaatgggcttctcgcggatacgcaagccttgctcgagggctgtgagaagctcgcgggcagcgaaggcatctgcgggcagcctcacgcggattgacttgccactctcaaagtcaacggtagagaagtgcttgccattttggctgaagatgtagttgcgaagagtgcgggcgcgagtgttgcctgactcgcagagtgcgccaccatccttgtatgtctggacggcgtgagcgcagttgcggcaccggctggcgtgattctcaaagtcctggaccaccagcctctcatctgcatggagctcacgcacaagcgccacaggatctgttatctcgattggggcaggcattgtattggtgcggcgtagtccaagtaggcgtcgtttcagactaggacggggaggagatttctccgtagaagtcaaatgagtcgagcggtcaacggtatacgaggtcgagcggaagggcgacacggtgactgatttataagggtcacgcgaaagcggtaggtgatcaccgtatagagatgatcagatgtgaaattcaaggcaatgaattggaaagtgaagttcgaatgtatgtcaatgtatgccaatgtatgaatgtgtgtatactgaggaagatattctagagtaaaaggcagggggccctggtcattatatactgagtgagtatcatgcagagtctatagatggcgtcctggcgcctggagggtctggtgtctgctggtggggcctgagatctgcgatacctccgtggtacttggcccattcacgctaaacagacgggaaatgcaagtattattcttgtaatacgtctgctctgtattttccgtactggctgaggctgtgctttatgtttgtcatttgcttgattggccctgatcctcccaattcacagttaacttcaccacaacctacactatttccctttcagtccccgacactatttctaaggcttgatttagttgtatagcctgatccccatgacatcaactatcgggagagttttattacgcaagtcattcaccgaaaatcgtgtggctcatgtttctcgttttcctgcgtaatgacaagggtctcgtgccccctgttcccctcccccctgagaacaggcctcgagttcgcgtcatttgctaccctttgaacgtccaaggttgacactccgaaatagaatctcaagattcaaccagagccagtacattcggaaggaggtgtttcatcgcagtgtttccgcccactcattccccacgctcataggctcccgcaaccgcgatgagcgtctaccgagacaaatctggaactccctaaaccacttcaatgggactttgagcattgttctcttgttccatatttggagatactagagtgtttcaaactatctaagaatagtgcgcgaactcggattctttattttggaccccaatattcggggattctcaccagcctcaattacccctcccagctgcgagccgaaagatatacaacagctctcatccagtgctttttccagactatccccaatgtaggatgactgctcagcctcgaccactaacttcacaatctctgatctgtgattcgatacaccagccactgatgtcttctttcacggaaactgcttcctcacaatttatccctgtcgctacgccgctggcgttcaagccaagagtttctattcgatcacaaccttgttttcgatatgtttctatgtctccattcacgtcgcttggcgcgcgcgccaggctaccatttcttcgatgcatcctctttttccctccctgggcatcataagccacgttgttgataccatggggcccgagcctccgattgcgcgaccacctcaaagagattgttattttttcttactctgtttcaccaagcgccaacgagctgtctatccacagatcggccgtctattcatgaaccgtcacgagacgtccctcgtgtcaacatttacccgcaccctcgagattcatgttcccatactgaccgccgaccaaaatcatcgccccgagctaaccctgccgcagtgccaatatcacttgtactattgcaacctcattcaacagcccagccgggctagctcaatcggtagagcgtaagactcttaatcttaaggctgcgggttcgacccccgcgttcggctattcctaaaaccaaacctgagatttctggtttgtccgtggtcctcatcaacggagatggaggttgacgaaagaaaggagagttgagagaaagaaagggaaggaaagagggaatgatagtgtggggagggtaattatatatgtcggatgattttctgacaagagattattgaagaggtttgcgttgccatcaaatgtaccaacaccaggtacagtataatcaaattaaaatagcattcaagtagttatacaaccctatatgacagtgtcatatacagttatgcttctcaacgggctgcaggatgcgctaagaccgccacctgcatgtctatattctaccaaagaccttgtttccgtccatggagcactgtttcgctgctctcttcaacagcccggccgggctagctcaatcggtagagcgtaagactcttaatcttaaggctgcgggttcgacccccgcgttcggctattcctacaaaccaaacctgagatttctttttttttcgctgatcaaaattttctctttgagcctcctccgcccatacatgaagctgattggccgttgtagccatttggtccactagtgggtccggtcggtggcttgagaactgcctatgtacaacgtatgttttgtgtcttgcctgcatagtggatatcctgcgcatgaacaagcaactgtacttgtcaggtcacaagtattcatgcaggacaaaaattcttcaccgagtctgactagcaaggtcaaatcccggccgccatttgtggcttaactaggcccgagcgcaaggcagagaacgccttgtgctgataaagggtttttctccggctagacatgcatgatgtatcattggaaagtctatgtaggcattgacttcacctttgaaataaccacgccatttttcctatgattcgtcattaagaatcctacgttgccaagaaaaagctacaagaaaataacattgctgatatacatcgctacatgtagtggctgcatcatcgggccggtttttaatcgtgcccctaaacccaattccacatgattcctaaacagaactgatttagacccactatgttaactgcctacgacttcggagatatggcgagtatacaagctccaagtataccaccctagcatggcagcctacaacggattacaattccgagttgagagaaacataccgaaggcatttgccacccaggctaattgcaacagtgggataggctcgctacccctcaattgggtcgtctgccttgagtatcgctttgtcctcatctgaaatggttgacatgttgaatcttctagggaattctttttcttcgcttcccctctttcgtctgccgcggtagccttgattgaaagccatgagttgcctttttgccaatcacatcgctgctagagagggcacactatccaccgtgcaaactacagccttggatgtctgaccatgaacgccagtctgcatgttaatgtgtattgagtacagcgggagtgctatacgtgcttccctttgatacgttaccgaatgacaccaagattgatcattttaccaacggcctaccaacgtcgagaagtcctaatgatagaccccctacatcttttcataacagccgtaagtgttaatatggatgttcggtttatttacgagtacagagaatacacttactttacaggtgcgtacggtgtaccagcagctcatagaacatatctgcactaagaagtagtccgaaaatatctcagtgcttaggaagagaagcgatttttagaaaagctgaggaaaggtctcactgcctccacatgaaaatggcccgcttcatcggggatagggaaataataaggtagtcactgatctagaatcgtcggaaatgccacgatctttttttgaatatctactttccggcgtggtggattactccatttggtttggatccccagggaactgaaaccaacctagtaatggttgaagccaagaagactaggtctctagacgaaggcatgctttcatttctaggatacatgggtaatgatcttgagttacaccttactaacatgaataaacgcatctgctgacatgaataggaatgatccatcacgcgaggaaaacggcgaaaatgcaggacactcccgtctatggcatcgtcaccgatagtttccgctgggatttcatccaaatccgcgctgatagcgaagtacaaaacccatgggacatactagaatgtcactaataaattatctagttcgtaactcgacgatacagatggaaaaagagcaaggctgagtttgtgtccgtcctctacgagattttcgagaccgccacatgttcctccgcccagcctcagtagcagcgcaagtgaaggagtaaagattcagacaccgaattcataactgagttgagaaaccactataggcacaaatggagtagaaatgttcgtgctttgcccgagaagccatcctgaaatatataatgactcgcccacaactgtgagcccgttttagatggctactatcccatgaatcgcaggactagcacccgtgtttacatgtagagtattgagggctatgccaatctcaagcttgaagtgatgatatccatgtacgagggcagtcacgtgagtgctgactcagggttatctcgaactcgtgggcttccctcaggagcggcgtctagccgctgggcaaccggggcggggcagtctttaatctcaaggttgatcaactccacttgttcataccctctccatttgttgacgtggccgaattcttcgattacatgtactccttccttagttttacctttaccacccacataaagtagctgtctatactgaattcttgatatgcatcggaagacgcaataatctgcccttcaacatgaacacaacgagtgacggcgaagctatggcggccaagaagcaaagaaccaccaagaagcaacgaaggaccaagaagggacggtacttcattcgttgtgcggtcgtaccgttatccgactcggtgacctcgttgtgaagtctggccacctccgcccccaggaaggggaaacacttcgtttcatcatagcaagtacgacgatccatataccttacattcatgatattcgctgggaagatggcaaagtcgatgctcttataatggactatatgcctggcaagccgcttgataaagcgtgggatactttaagctctagtcagaagctctccattgccaataagctatattcctatatgaagcaacttcgtgagctgaaaggccactatattagggctattaattggggcaaagctattattggacgcattgcatcaattgaagggggtccatttgataccgaggcgcagttcaacgaatttattctaggagatttcgtcaagatagcaccagatatgctacgacattataccaaatttgcgcttatggatgaccatgagattgtattcacacattctgatttcgccccgcggaatattcttatggaagctggtcgagttacagctattctggactgggaatatgctggatggtatccagcacattgggaatattgtcaggctcttcgccaactgagaccaatgtttgactggccagaatatcttgcccgtattcttccgcccaaatttgagcgagaatatataggcatgactttcttagctcgtatctcacgtcactagttagctagatactgttgatattatgcagctacatacatagtcgcctactctaattcgggagccatgtatgatgcatccattgacccttcttgcctaaatactgcctcagcccgagcaacaatgtaaagaaaaaaagatcaaaaagaaatctcaggtttggttttaggaatagccgaacgcgggggtcgaacccgcagccttaagattaagagtcttacgctctaccgattgagctagcccggccgggctgttgaagagagcagcgaaacagtgctccatggacggaaacaaggtctttggtagaatatagacatgcaggtggcggtcttagcgcatcctgcagcccgttgagaagcataactgtatatgacactgtcatatagggttgtataactacttgaatgctattttaatttgattatactgtacctggtgttggtacatttgatggcaacgcaaacctcttcaataatctcttgtcatgagggcgatcagggtaggtggataattataccaagggcaataataccatttacggaagtagccgtcaagatataatcgtcggcttgttgatatcgagactgctagtgaggacttttccttgcggactgtggatgtcttatgttatgtaaatgttcggaaccgatcctctgttctgttgctagtgggactattcagttatccagagatattgcgacgtggcactagtgttgactgaaagaagaggagaccagatatattgagtttgcatgaatccaagtagcataaaatattcaagtattcaaattcatgagtttacctcccgacgctaatacgcaaaggggatgtgcgggtgaggtcatcacttgccctccgcaaaagtggcaccatctctcgagtctcaagtgcgatcacatcaaaagaaccatacatacatctcaaacacaaaatgacatctgcccaaccctcagagatgaaagcctggctctactccagcacagccaacggtcttgaaaagaacctctatttcgacgcctcagcacgcgcaccaccgaccgtccacggcaacaatgtcctagtcaaagtcctctcggcctccctgaacccagccgactacaaagtccccgagatgggattagtaggactggtagcacaaaaattcgtgatcggcacaccagcctcaccgggaatggacttctgcgggcgcgtggtggtcaccggcgatggcgcgaccgagttttcaccgggccagctcgtgttcggctgcctcagtgtgcctgcccaattcggctcactgggcgagtacctagtggcatctgcaagtctgcttgcgcccgtgccagagggcgtggaggttgatcatgcggcgtccatcggtattgcgggacagacagcgtaccagtccctggctgggtatgtcagtgccggcgataaggtgtttatcaacggaggctctggaggatgtggaatcttcgcgattcaaattgctaaggagatggggtgtcatgttaccactacttgctcgacgaagaatgtggagttttgtcgtgggctgggcgctgatgaggttattgattactcagttgaggaggatttggttgctacactgcgcagtcgtggtgttgtctttgatcatattgttgatcatatcggataccctgcgccgatgtatcgcgagtcgcatcacttcttggcggctgggaagacatttgtacaggttggcgcgtcgggcgtggggacttttgctgataggttgatttggcctagtttcttgggtggtggaaagaggaaatatgttatcttcttcttcaaaaatacccgtgaagatcttgtgaagattggggaatgggtgcagaaggggactgtcaaaatccagctggattctgcctacgagtttgaggatgctgttaaggcattcgagaagcttcgctcctcccgtgctaggggaaagattattgtgcatgtggccaaggcatgagttgagattgaatacaaatattgcgagtcgaagtggtctttttagggtttggcgagacaacctctccgcgccaaatcgggaaagtgtcacatctgagaaaggcatagtagcgagctccgacgtaaacttgacgatgtatctggctatgtgagtgaaatgaaatgggatttccctcttcctcatcgctaatattcaaaatcatcagttcaacggctttcttttgttcagtatgcaatatctattatttccttttctgggtatcttcggttgcattcctattgaaatccgcctgatgatatgggaccacctcttctcgtccctccgcaaacaaccactcaaggatgacctgcataaagacaaacctcgatccattctttgcaccagccgatatctgtacaatgagatctcatcccatatattcagaaactccgagcagcacatctttatcagcccaatatataacgaagaaaattggatggtcatgcaattgaaatccagagttgtggacgttgagtgggcattcagtagtaaagcggacgccaaaaggcatttccagaacttcccccatccaaaaacgaaaatgatagtacatatcagttgcccaaatccatcagacccgggtcaaatggtgttgctttggcagaaactcaacttgctagtcgatcttctgatcccggtggctcggccgactatagagctggcaactaatggaccatggtgcgcagaagacccaccgactcactggggaatatatagagatcaattttatgagatgggggccctacaggagtcaatccagtccggacccaaattccgtcctgaccacgaccttgccatgttacccttccttcgtctagggctatgggtccaagatccagaaacaaatgtgcccgcaatgtcagaccgtcatttcaaagacctattccagtccctcgtgtctctattcgatcaaaaagggatcgagctccgattaaagaggcttctcgctatcacccaggacacagccgtcagccaaattggaaatgcactcaccgataccgacatgttcttagagacctgcctggatgaactaccaggcagaacagccagcttccttcgtcttgaacgatacaaaaactggttcgaagacgggacaagctgggaatcgccgtatgagacacgaatgcgagaccaattatccacctgtccctgggttatcatgaacacggatccttggctccatcgatcgaatcagagatacatcgttcttattctactacaccatttcatgtatgcgatgagagcaaatttgtgtgatggactgaggatttttgacgatgcaagaatatacacgacatgggactcggaattgtggtcgtattatttcccagatggcgtttcggagctcagccatatccaaacctggcttacgaggttctggccccagaagtcccagtttcggaaattccatgcctatacggattggataggtcaacgacgggcggaagaaaatggagctgatgaatccagttgtgaatttatacaccgtttgagcttgtggggccattgaaggctgtcaaggttggatttatcggtgagtatcgaaggtaacagcatgcgtgtgaatctttggctcagttcgaactggacagtcattgttggttggaatattggaatctggtttatggtgcgagggaaactagctaaggaaactaacagatcatgttgtcactacaagttgtttattctatagttgagacagaatatcaaaggctcagcccattcttacggcaatagttgacaacttatacattgtatcagaggtgtatttgacagatgtgctcgactgtattataaaccccaagtcctcatctacagagcagaatgcttcgagggatcttctttcaaaggcgccgaataatcatcgtcgtccatatcaatcatttcaatacggtgggtcatcatgttctcctgagtctgcgcctcgaccttcttctgcaaccgtgcatcttccccaaagccctcctggctgttcagggcctcaagagcagcagatgattcccggtctttaacaccagccttgcgctcattctctaaccgctccttctcctgtcgcttatcctcgtgggcaagagcagcttcttcgcgttcaatctcactgggatcaaggtcctgaagcccgataagggtaagaattctgccaagcagaaactgataccgcaggtggccattgatcagttcgcttacgttgaggttctcaacacctggaacaccttcaactggctgcaatcccgctacaccgagttgaaagctgcttgttcggtagaggaaagcgagtacagagtcattttcagagaacacgttcacaacacgtccgcttacgacactgcgaatcttttgccagtcctccgcgtttgaaggggtaggtgaccccatcaaaatgaccgattcgatcaggccatacgcgtctctcctttctaggcttttgaggcaggagaaaatcagacgagaccctagagaataccccatcaaggtcacgggtcgttctccctgggctctgttaatcagtgcatcagcgagaacctcgcccgctttatcggcgcgagctttagccacgctgaacgggttgtcgacgatgccagcaactttcatgaggcctaggggaagcattaccgcgctcatgatcgtgtggaagaaagtacgagccaaaacctcacgtccggcaaccgaccacgcagcgctagtcacaagagctgatatcgcgttacccaggttcatcaaaggctccatctcccagcgaagaccgaacacttcagagtcggcaccaatcacccgccatgggatcacgaagttcgactcttccttgacccaaccggtaacaccaatggtaacccgtaaacgatgatcttgtttagcagactccttctcttttacattccggcggggttctcctcttatcggtatgaaggcaaagtcgtccacttcacgtgcgtacttttccatcatgcgaccagtcatacgtccaccgtaagcgccaaaaaggccaccaacaacgacgctacttccggccaaagtacctagaagcccagcagcagcggtagcgccaaggcccaatccgcccataacagttcccaggcccgccgctaccaatggagctgcgagtccgccagtgaggccaatcaaagcggctccagccacagatgcaaggcccactttccattttctcatgtcatcatttttctttggttgctccttggtatcttgatctgccgagagcgccaaagctgtctgcagcaatccgcgagcgacagtgacttcgtcttgattgagtatgttgatatctatgttcagactggatgtgacgttcaacatcaagactcttgagtaagcactgtagtgctctaggctgagcattaaaaggagaagcgagtgaagaataagcagtcttgttgcttttgggagttttgccaaaggtgtttccacggggtggtatatttcttgtaacttggccagtctatctttatcctcgtccagtggaagatcatcagacttggcggcgttccgcaggtcttcgcctgcctttttttcctgatcatcatcatctttattgacgaccgcgccaacacgcaaaaggacagaatccctccaatcctcaaaagtggagagcgcacggatctttggccgggggattggctgtttgctagtagatccctgccgcggacttccattgtttcctgacgcgtccttgtcttgtgggcttgagggcaagtgtggcgtctcttcatcgcggtccgcccccggagatgggcgtggactggagtgattgggggaattatcctttgtatttgtatgctcataaagctctagaattcgaacccgcattgactcagctacctcagagacgaggacagttaagtcagcacgctgcgaccgatccaagatcgatgatagatcttgaccacgatcgctttccgaagcattggattgcttagattcaaagaatcctccatgtttttctttgagacttttgaacattggcgctgaatagaggtgaaaaaggagttgatgacttttcgaggagtaaacaggcagaaaccgatgttgttggagagggggcgatgtcgtcatggccccttactccgccaatggcctgaggcagaaacacctgacccatgttaagttgatatcactctgctttgcttcatgcggaatatttatgccttctgtatattcaatgccgtagaaagtcgagggagtaactcaattgccgatttcaacaacaaaaaatttcccctttgtctttgtcgcggacccgagcgcattcccatcccaagcggttccatccggatgattgtttttttcacctgggactcgctggatttttccccgtcgtccggacaccttttccttagctagggcgtccctgagcctttcgattccaatggtttcctcttccatagcagcaggactttcatcgcgaattctagccagcggcgcgacgccggtagtgtcaacaagttggatctccttcacaaaatgaatttgagactcgagagtatcaagcatagactgttcttcttcttggctggcaggctggggaagagctgagatgcgcagcagatgatggagttgtttcggcgtgattgacggtggcggtttcgaggcgggattcgggaggagtgatctgacagaccagttcggcgcaccaagtaagaactcgatgtctgcactgtggcactttttggaagagtagaagcgacagaaggtcgtgttgagtcggggaggaccggggcgtaacgacttggatagccgagcagcagtgcgaagagaggtcattgcagagtctccgaggatgggaaatcctgctgtgggaagaatacagagaaagcagacgagcgaaatagaagcacagtctaatctgaacagcacagtgtaaaagtagtcataggttagcaccagggagcttaggcggatatcgagaaagaagtgacaccgcctccacgggcccgccgatcgatgctctcatcgataacaacctcatttgaccacgacactccaacttcacatcgaatatctgcggactactgcctattgcagggaaaacagacacatacactcaagatgactcaagatccccgtgtcctgctccaaaaagtaagcattcctccccaccttgcatgggcaatgacgatagtccgcatagctgactagacctcgcttgttgcgatgaaataggccgataaagcgctatccggtgcctctagcggcttcggttggtttggaggaagaggagagaaatatgagagcgctgcagatctgtatacccaggctgcaaatgcgttccgagtacagaaaatgagtgagataccccgcggcctaactagttcgttgacttgccaaggggaagctagatgactgacctgcgttctcaaacagacaaggaggccggtcttgcttttgagaaagctgcctccatccaaactcagagcctcaacgaacccgacgacgctgcgaataacctccaggaagcgttcaaggtctaccgcaagacagaccccgaggatgctgcccgtgtactttccagtgccatccagcactacgtactacgaggaaacctgcgccgtgcagcaacgcaacagcaatacctggctgaactgtatgaggtggaacttggagatatgaagaaggcgctagaggcgtacgagaaggctgccgattggttcgagggtgacaatgctgaagcgtatgtatcccatgattttttttgatatctgtggattcggggaagtaactcggctaacatatactacaatgcagcctcgcaaacaagcactacctcaaagtggcggacctgtctgccctggaaagtgactattacaaagccatcaccaactacgaacgcatcgcccgaagctctattaacaaccacctgatgaagtggtctgtgaaggattatcttttgaaggcaggcatctgccaccttgccacaaaagtatgttgtttccatcttattcttatagggaaacagagtattaattatttataggatcttgttgagactaaccgtgctttggaatcataccgagaactcgatccttcctttagttcgacaagagagcaccagctactcgtagacttgacccaggctgtcgagaatggtgaccaggaaggcttcgccgacaagctcttccagtatgaccagctcagcaaactggacaagtggaagacaactctccttctgaggatcaagaataacattgaggaagctgaagaggacttctcgtaaatgacgattgatttcttcggtgattccccgcgcgtgatgtctagagaatattgactcttcggtttttggcttcttccttcgtttgtttatcttggaaatttctggtctgaaagtgaaaacagatcgatgctaccctcattggttatagtgtttttttttatctggccttattgtcacctagaaatatcaaatctcgaattcttgattatggacatttggatactactgttgagcgcggaatgcaagagtagaagattcgtaattcatcattctaagatgcctcagttctatatgtacttttttggggtgtctcatgcttccttcagaatcagcagagctgccctcatcatgtaatcagttcagtcaaatggtatcatatcatccacctccccagtgctattgaaatcaacagcttacgcagtaatggcatccaaagccttggatttgcgagggaacacgcgcttgtataaactgacacccacggagtcttgtgggttgatcttggcatcgaaggtagccttgaagtatccgtgtgtacccaggctctccttgaagtatccactgcggccacggcgggtccacaactggagtgccttgaaccactggatatcctcggcgttgaagaacatgtagcggatggtaacgaccttcttgtggatcttgtaggggtgaccagtgaggatggcacgcttcgcaaccacgcgcttctgatcgggtgcgacaacagtacccgtaccgatcagttcgagttggtccagggcaatcggctcctccttggaatcagcggtctccatctcgtcgtcagcgtcctcctgctcggatttcttctgtttgaagacgagaataggaactgaaccccaagtcatgggtccaatccaggatgcgatggcactgcggccagggtgcaagtatcggtcgtacttgtgaacgttgttcggcgtgttatcagccgaggagaagatggggttgacgaccatgcggcgggctccgcactggatgacgagctgctccttagccttgaggggcttctccacgctggagttcagggtcatgctaacgttgaccacagtctgcttgtgctcatggcggagcagagagaagagagagataggcttggggctattgcgcagaatggaaggaactgcgcgaaggtgaatatccacgcggacaccagggttaacgccgccggccaaagcctctcgaatgatgcggttcttggagcccttgacatcagcaaactgcaacagtcggcgccaatcctcgggctcgtagggacgatcctcggatgtttcccagtggctgagcttgaggttcttcaatcctcggaatcgggccaggcgttctctggcaagcgcgttggggtgcaattcaatttcatcggggaactccaagtcctcttcggcctcggtcttgcggctggcacgatagtcggccaattcctgggcttcgtcctctggggaggggtcaaggaacatctccgattgcgggtattcggtaccaccgccctcggtcatggcatcctggtggtctgggaacacgccatcttcgggtgctccagcagtatccatctccatgggctcatcctcatcctccatgtcggatccggagtctgagacgtcatcgagataccaagcagactgataatttgaggtacccttgggcaacttcttaggtaccgggggaatgtgcgagtcgtcatccgagaagtaatgatagtcatccagcagaacacccttcttttctgtctcagccatggaaaccatgtcgtcatccaccatttcaatttcttcgggagcgataatagccatatcgtcctgatcctcagtcggagtatccagaatttgtgtggtctcatccgcatcaacagccattgcgtcatcccgcttaggcttagtagttgtaagcggcgcagctgtgatggaatcaatctggaaatcgccccatccagggacatgaacgatccggtctgccttcaagccccttccacgaacaactccggtgatgacgacgtcgtctaccacttcctggttggactctggccactgaacattctcgacaaacatccagctgcgatcgtcccgccagcggatacccttgggagtagcagtgcagatagatcggatggcattagaagattcctgtctcgagtcgagagacataaccttctcaatagagggaaagaagtggttaatgaaagacttcaatgtagtagccacctgtgggcgcttcttagggggttcaatcttgtcgagaccttgcacgacagccaacacattcgagataccctggccttgaatcgagcgcaacagcatctcgccctcctcatcaacctcaacttcagaggacatgaccaagatgacaaagtcggccatacggcacacatccagagcgctcatcaagtcatacttggcaggaacgtactgcacgctttgacggaatcgatcgatgcgcacacgggtgggcccatcgggcgagacgtcagtcaagacatcgacgctctcattgatagaagcaatagcagcggcggcgtcaacatcggcggataacggcacaattgcgacatgacgtggagcaccattctggccggcgaagacgctggtagcttgggatctttcctggtgcttcaacacctgtctttggcgggcggtgttacggcgatcgagtttcgtcttaagttgttggtggggtgtcctacgaccgccccgctcatcaccttcgattttgcctgtaatagtataagcgttaaatttgcattatttaccatacttggacattttaaaatcatacctttggcctgatccttcaaggcgcttttggaggcatgcttagttttgtagggcttgtgggaaaccttggtggtggagcggtggtggtgcaccgtctgggcaggcgccatattggcgttggagcctttgaatcggaaagggagggattccagattgaagcgagtcagaggtaactcggcaaatatccagtcagagctatttataactggcaaatacacagaaataaaatcgaaagtgcctctagaaaaaaaaaagaggtaacgataagaaatcaaaattcgccagtggaggataagcgagcggtgagcgcaaatcttggcgaaattctgggcaaaacactttttttcttgaagctacgcttttcgtccgccctctgatcttcctcggttctttcgcaaacgaactcgagaaattgccataaaatggccgactcagcctcaaacatggctgtcgccaagggcgatcacgagtccaaaatgagactcgcagcagccgagcaaacctacggacgaggcaaaggcgttaatgcgaagagtgcgcgggacaagaagttgcgcgcaaatctcaagaggcaggaattcaagcacaaggaggctattctccaagccaaggatgcagagattttgctcgagcacacggaaggattcctcgaacccgaaggtgaactcgagcggacatacaaagtccgccaggatgagattcgggacagcgtcggaatcgagacagcaaagaagggatttgaattgaagcttcccgatatgggcccctaccgcatggactactctcggaacggacgtgacctgctgctggcagggcggaagggacatgttgcgacaatggattggcgcgagggcaaattgggctgcgagttacagttgaacgagactgtgcgggatgcccgctggctgcataacaaccagttcttcgctgtggcgcagaagaagcacacttatatctacgaccaccagggaactgagattcactgtctgagcaagcacctagaacctctcttcctggaattcctgccatatcatttccttcttgcaagcgctgtgagtatcctcgcctctttgattccatagattccccgctaatcaaacctttgtatagcaaatgagcggccacctcaaatacacagatacctcaaccggccagaccgtcgctgagctacccacgcggttgggtaaacccaccgctctcgcacagaacccatggaatgccatcctccatgtcggacaccaaaatggagccgtgaccctttggtcacctaactctcaaacccctcttgtaaaggcactcgtgcatcagggacctgtccggtcactggcaatggatcgcacaggccattacatggtatctacaggtcaggaccaaaaaatgaatgtgtgggatatccgcatgtaccgcgaggtgcattcatactcatgctaccaacctggtgcatctgtggctatcagtgaccgcggtctgaccgcagtgggctggggcacccaaatgagcgtatggcgtggtcttttcgacgccgcgcaagccgaccagggcaaagtccagagcccatacatggcgtggggcggagacgggcagcgcatcgagaacgtgcgctggtgcccatacgaagatatccttggcgtaggacacgaccaagggttcgccagcgtcctcgtccccggcgccggtgagccaaacttcgactcgctggaagccaacccttacgagaacgtgcgacagcgccaggagcaggaggtccacgcgctgctcaccaagctgcagccggatatgatctcgctcgatcccaatatcattggaaagctcgataccatcaacgacaagaagtatcaggagcagcgcaacccggaccacaagcccgaagatcacatggagaagatcaagaaccggggtcgtggccgcaacagtgctctacgcaagtacctccgcaagaagggtggcaagaacgtcatcgacgagaagcgcgtcaaggccgagacgttgcgcaaggagtatgctgctcgcacaaaggacaagctcaagcaagagcgtcaggatcttgggccggctctgtcccggttcgccaaataagatcactgagtttgtttcttgcttgtgtgacatcttgtggagcagtagaggaacaacccccctctgcccaaaaccacccagatacccagcccacacgcggcttctgtgacatattggagatttggcgacagctgcattccaggcgttctcggggaatatgtttgtattcggacggaaaaagcagttaaatgtgtgtaccatcttttttcaacacattgaatatattgaacttcataactattttatacttcttaaacttccaattccacttcgtattccccttttgaagttttcaaggctatatatccaaaatcacaagttaccggacctaaacctaccagtctaaatagaacatctactcatcaagactcccagaccccctaacagccccatccttccacctctgcaaactaacctcataagctccactgcccttccaagcactaataatcagattaacaatatgatccatccccttcccatgcttaacgaccgcaaacaccgtcggacccccctccctcatcttcgccgcatctctctccatgacagcaagatctgctccaacagcttcagcaagatcaatcttgttcacaacaagtagatcagaccccgtgattcccggtccacccttacgaggcaccttatcaccacccgcaacgtcaatcacgtagatgatgaaatccgccaactcgcgcgagtagttcgcagccaggttgtcacccccagactcgatcagcaacaggtccgttgtgaactgcttctgtagtttctgcagcgcgagcaggttcgcgctgatgtcttcgcgcaccgcggcgtgcgggcaaccgcctgtttcaatggcgcggatgcgtgacggcgccagggctttgtggcgggttaagaattcggcgtcttctctgtttttcgagagaatgattaataatgttggtgaggtatggtaggtacgagtcttgttgtttcgggtgtgggtgtggggttggtaggtggggttagggtattctctcgtaccttgtgaagatatcgttcgtcactgcggcgatattatactcgtctcgaagggcgcgagatagcgctagcatcagggctgtcttgccggatcctacgggtctattcagatccaagactcatgtgttagtcactggctctgcatataggtgtggtgatttgaatggatatgcattggtataaagcaggtgaaatagaggttgattgcaggatagagaatggcaacatacccaccaataccaatagtgaaggcacgatccttccagtctcggccttcgatcaggggcatctcgcggttgacgtaggagcctgggccatcgaggatatcgtgtgcatggccgtggccgttgaaggggtcatcgtgggaatggtcaatgccggcgtcgtgggagtgagagtgtgccattgttaagcttccaaggttgatagatgttaagaccaagtcagctcaggattgtttagagaaaagccaagatgaggggcagttctatcccttggaagggtgtggggaactgatatgataaaatgccgagccttcgatatcatcgattcgccgctcggtttgttcaaaagagggatactcttctgtaaattgctatttggggatttatgctggttggaatatttaagaaatatgcaaagatgtccccaagggagacatttcaacaaataatggaggactgcatatatagagagcccatacttcaataccttcatgtatacaaactacgatgcatcaatgaagattgaaaagcatgtatttatggattcgtcaagcagcggcagagagagtataagccccgagggggaagagatgtcaagccaaatggaccatagaacacccctatgcacgcagacgtagttcccaatgaaacgtaagagccggacgcctatcattcgccaaacacggatatcaatagttctgcctgttcacaagaagaagaaaatgaacagactgccaaggaaaaagcgaataatgggcaaaagtcgttaaatcccagacattgatggcaaaaggatgaaaatgaaacccgaacagtaaagagatagaaaacatgcaaggccaggaaataaacccgagccaacaaggaaacgctgaaaggaagatagagtacattaggtcggagttgagcaggatcgatgaggcctgacgctacttccaagcgaaggaagatgggaggggcctcaagcactgattaaatcccgtcgattgtgaattgagtcgtcatgtgccaaaaagcaagatagatctttcaggtagatgaaagacctagatgaggagtaaacaaacaagagcgggcgcgacatgcctcgcccaggtatccagtcgtacgccggtcccgtaccgcctgagacggcgaggaaaatgaacgcaagggaaagcaaaccaaactcccaacatgattaggcggcggcacccttttgtcgcttcggcacccgagggctagcctttactttcgctgagccctgctgcggagcaccgttagcttcgactccaccaccgtcctcggattccattttgacggtgctcgcccggcggcgtttgttgccacctacatttggactgttgttcacgccggctggggacggatgcattggtggttgcattccggggggaccggcaaggttgctttgggctgggctcggatgtgctgaaccagtcagatgaggcgagccttgctgcccggggagaccaagatgagccatggcaggcgaggcgaactgtgatggagcgcccatgctatgtccccgaacattttgcatgggttgcatgcctgggttcataccgggattcataccgggattcatgcctgggtgcatcgcgtgattcatgcccggactcatgcctgggtgcatcgcgtgatttatgcccggactcatgcctgggtgcatcgccggattcatgcctgggttcatgcctggattcatgcctgggttcatagctgggttcatacccggactcatgcccgggttcatgcccggattgatgcctggattcatgcctggattcatacccggattcataccctggttcatacccggattcatgttctggttcatgccctggttcatgcccggattcatgcccggattcatgcctggattcattcctggattcatgcctgggttcatgccctggttcatgggcatgggagtcgatacaaagccaggattgggattttgtgattggagggtgctgacaagattccgtaaagcgtcaggaggtgataactgcggatttgcctgagaaaactggaacaacatttgcatcgcagaaatggtttcagctacttccatgaatcccatgactggagttggcacgccgttggcagtcacttttgaatctggcaccaatgacggcgtttgcttaggctgggcacgttttgagttctttgtgaccttcggactttgcttttgggaatccgcctccatggccaacaacaacgaccgtggaatgaactcgttgtggctgacgacattaacatcgagcatctcaagcttgttgtgcatatcgaagtgcgcgcgcagcgtgccgttggtgaaaagctaaagcgatagatattagcaagctgaaaagaaaatgaccatgcgactagagatgtacctggcactcattcttgaaccaataaatgaatgaacattttggcgcttcaacgtaatgccctccattgtgggattcccgctcgcgagcaccttccaccaccatctgaatttgactaattccgctagtgaattgggtcaaataataacgtgccagtgcgggtgtcgcaatttcgaattgtttagatccaatcgtgttgttccaaacaccctgcctcaagacacctacaggggagtagaaccgctcgacaaacgattgccaatatagaagatcctgtgcttcattgcgggattggaagtttcccaaatgttcggcataggcatgaatggtcaatattgcgtaattcttcctttgctgctgctgttgttgttgctgcatcataagagcattttggtgctgctgtgccttcatttgagcctcctgggccatcatctgctgattctgaggacccggctgatggccctgggaactctgagaaggctgcggctgcggctgcgggccagcctggccctgttgacccggctgttgagattgtggcaattgctgcggtgggggattaggagttccctggccttggggcaatccctgcgattgtggtggttgagtggatggcggctgagaagtttgagagggttgcggtgtgccgcctcctggcccgccatgctgcgactgtggggtggcactctgttcgtgcatattcggaggttgtgctgatgtacgctgcggggtatgctggcctgacggtccattattcccctgttgttgagcatattgagcctgctgagcctgctgcgcctgctgttgagcctgctgctgcgcctgctgctgagcctgctggatagcgaaaaattgctgctgctgttggagacttggcggctggccatgtggcatttgctgctgaaggtgcatcatattaacgggtcgcattccagggttcgcttgcattgcagccatttgcgcagcattaagtccttgagtaccattaggcattgatacgggaagaccctgttggtgttgatgttgttgttgttgctgctgttgctgttgctgctgttgttgttgctgctgctggtgctgctgttgctggtgttgctgctgctgctggtgctgttgctgctgctgttgttgctgctggtgctggagcatcattcgttgccgcattaattgttgctgttgctgttgctggtgctgatgtaatagatggggattattcgcaactatgcattgatcaggacgtaagtatgcgatcgagaaagacggctggaagagacgcgggtgtagcggggggaagaaatcaccgcagagggcagggaccgcgtgttccgtaacattacatctcgcaccccatgcgttaagcaaatagaagattgaatactaacaattttgttggaattgggggttctgaagcatatgcgcctgcgcgggattcaggtgggagagggcatgagcatttgggccggggccaccaggaccaactgccccagcgcccgggggcatgccgcccatcatcgggcccgcttggctgacttgaggtcctcccggcgcagagacgccaggatgcatttgctgtaccattccagcgcccgggtgtccatttggatgttgcgcggccattgggtgaccggggggaaacccatgttgcggcatgccttggtgggcaggaaacggctgcgtcatcatcattgctgagcgacgaagtcaccacaaatgggggacttcaaaatgatcgctcgcgatggcgaaaatgtggtgggcgaaacgtggcgtggagcgcgactggagtgggaagacaacaaggccgcttttagcgttcggggatggaccaagacgtagcgagcgacttgaaccggtattcagcagacgcgaggtgctgaagtatcgatcggggccaagtcactcacccgcgcaatgaatctgttttccttctgaaacaagtgagcggtcagtggggagtgataagagaagatgtcggggatgaaggttaaaagtgacgggggctaggggaggcgtggaggggctgggctctccgaacagtcagaatatctcaaagaggcacaactcacaagtgtttttgctaagggatctggatattagggggctaaaggtgttgcgaacgcccaggttgggaattaaggatgatcgcccggtgggagagagagaactggagacggaggatccgggtccgtatggtggaggatctaaccgagacgacagcgcgattaatccagagagaaacagtgatagagggaaaataaaggactataatgagatcaggaaattgtatagatcttaaagtataagctccatctttcaatcttcattttttccctttttgaggcttttttcttctccttcccctgctctgagtccaatcacacgctatcccgaatgaggatgggtcacgtggtgtcttcgcggctttttcttcacaactttttttttctcttctcttcttcttcatcttctcctttgtctttccttcttctttccaatgccatctttgaggcataccaccactactgtgaattcctattggctttgtggttctctacctcaggtttctggagctctcttaatgttgattgcgcctgactcatgaggatagcatgatccaatgccaacagtatcttacgatccctcaatctcaccactaacctgatagatcaggtgttagcaccttgtgcttaacgtgagtttacatcctttctcgttcttcctgcatttgcatttcctatccgttcaaggatgacaaaacactttacttcttaaccctccaattcgacaatgcggagataatccggacctcccttcccggttggtctgctacttgccagtatatcttgtctgagaacttttattttgcaatgcatctttatcatgtcttgtcttgagcaattaactaatattgttctcagtctagatcgaaacatgaaccacgatgcatagaaggatatcgcctgttgtaatggcgaattgatcaagtgacgaaaaatttctcggatgtaaactcacagacctgttctgaatgcgcaaaaccgtgtagagatttccgttgccttccttctgatgatcaattcgctattacacctgtgtgttgtctggatatatagttgtggaatacccgaatgaaactttattttgacttgaagaatgtctgtcttgtagtttataataagttcacacctaatcctgaatgaacatgtacaagtattctaccatactagttatctactcagtactccgtaagccttaacaatcgggtgaagattccttccgttgtagggttctgcgaggcctcggttctcccaaccctagcaggataatctcttttacgggtcaaatattacagtaaatgttgcggacgacaacttgaaagcttagactggcagacctaaagttgcgttaactaactagctaatggcctagatcttacttgggtgtataaggaatgcttcgccgatcaactacgccacgcagatcgcagctcgcagctcgaatatgtcaagttagtagagacattatatctgtgacaatctgagagtacgactttgcacttatagaggaaggagcgacttcctcgaacctaagcgagaaatcaccatttgcatggttcgctgaaagagcccgcagaaaatcagggagcagaactcgtagacagttaccctttcccttttcctctctgtacttagtattgtgatgaagaagcgctcattcttttgaatcgaactggcacataataatatctgtcacttctcttctcgcttcatgaaatcccctgttcgtaggctatgaccttgtacttaaagggcatatagtgactgctcgaccaaggcgttcattcaaacaaacttatagcgcagtcttctcccccctagagctaccgttcccggaggaccgagttatctgcaccctggtcactcatagaccatggttacatcgagagattggcggttcactgcatcttcgttcaagaacagattttatagctcctcaatcgtgatatctggtcgatcagactgacgatgcatatagaacctgaaatcgataggagaggatacttccctgggatagtattgttagggcaggatagggcgctactatctgcaggaggaatagaaaccattgggaaacgacctatcgtcgtacgcggaagtcttgaataaattggcaacgtatgcctggatgctcattggtatctgcgggctggagcaagacaatatcccgtactggaggcgatgacgagggccagaataaatgttgccagtgaaatcacatcggctcgcttggttctggcgctttctaggttgtagggagacacacccggggcattacaacactggccatgtaatatcgctctgggcttatccctcagcattggtagcgcttgtttttccttccgcgagaatgtcgggggttacggagtcaaggataatgaaacaatatttttcgatattgattggttggctagaggaagaaagagacaaagtaactatgataggggtttgaaccttcaataagtttgttcgaaatcccgaatcctggattagccgcgtatgtgagatcgagccgtactcacaaaggttgcaaaatgatgttgagatatacatgatatgtttgaggctgttcagaggtgaatgagaggttacatagtttgacgtagagtggtctatacatagaatatcgggcatatgtcctcgtacctctatggaaacaagacgtgatcaacagagccaagataattattgatgatgatctgaatactactaccccgtataatttctctaaatagcttcatggagacaaagggacaaaggcctgaaaagcaggaatatttcaaatgggcaaagggagatcttatagactgcatgccagcaagcaatacctcaatgcatcaaaatgtcaaaatgtcaatgtcatttgatctctagctgttgtggtcaagaaaccgaagactgttcataagtaccttttgtatgggaagcccatacaaaaggtacttttacattagtcgcgggggaacgcgcggagcgggtatgaaccttcagtgatcctcgactgaagaatcgtatgcccgcggattgaagatgtgtgcgtgatttgaaatttgagctcatagttctttttgtatatgtatggaacatgtataaattgtaccgacctcataacaccgaacctggctgacgaaaatatattatcacgtgactcctcatttctccttcgtagggtccggtagggaccctgtgccactcgcgatttggtgcatacatctattactctcggcgatatcgcataaagctccggtgacactgtcccggatgtattcgtcaatgcaacaagtccggctgtcggttgcacgcccttgtcgatttgtcgctcgccgccgctattccgcaccgctgtccgcgcgacgattccatctgtcacgaacatggctcgcatcaccgtctcaagaccctcacgatgccgagtctacagcgccggggaatattgtggaagatccttccctcaaacctgagaatatctccgacaatggcacgccggcgatatctccctccaccgaatcagcaaagtcgatcactaaaacctacggatctgctgtacgcagagcgatgcgaaaccgaaagtccccgcagcagactttgccatcaacgacgactgtacctgcatggttttatgagcataatacggtgtctcacagcagtgaagaccgccctacacaatcacaatcacaccaacaggttagaataaccaagtcagggctacaaaaggaactggaggaggtgaaaacagaggttcaagcttccgggggagattcggacccatctgcatccagtgataccccggcagcaacagagaatcggtatgcggtggccgaagaatcatgggaagagctgcaggcctccgtcaaagcaggcttgcggttaccagctgtgaaatatgccaaagagccttcggtaaagaagtcgcatctggcgctgcattacccgggtagtgatggtataccattcctagacgcggtggtgaagaagcttgcccaggagctgggcactgacctggtaactcttaatgcccaggacattgcacaattgttcagcgagcaagatctcgcagatgttggggtaacttcgcccattcgatctctcgggtatgatgtatatcggcaatcggccccaacttcatggtcagaacttgaagatcctgaaggagacggcgaggatgacatgactgaaattgcaggtggtccccgtggaatgcgtggcgatattggcacacctcggtttatcacaattgagagcagcaaagaggccggtgacattccgcttcctaactggcttgggctgaaaaccctcttggggggatcgattaatggccaaacggatccggatcccggggccggggcctcatcaagtggtcagcgtgctgaaactcggtggattcaactacttaatgagctcctcgggtcatcaggtcaaccagcactgtcagtccccactgagataacggcaaatgccgaaacgaaacctagcaagccttcgccaactcgagacctcattatgcatatccaggactaccgtgacattcagaacactcgggaggggtctaaattcatttcactcttgcacaaagtcattcaagatcggagagcggcagggtccaagattctgttgattggaactacttctcaggaaatccaccactcaccctcacaagatggtgctggtctgatgcaaaatgttctcgatgaccagttctcgaagaccttgttcattacccccgccatgagctcgaaagacgccgaaaaggtcttcgcagaagaccgaaagaagcgcaccatggagatcaacattcgccacttgcagacgatgcttcgcttccgattacatgaacaggctctgcctgtaaaagataacatcttaagcgaccgcgcttggccgctagagccttcaaccatcaaagaatcaggaatccaggatcggtactggtcgtacaatcaagtgcattggatctctacacttgcacttggctgcactgaagtcaacgaggcccttgggtttgagcacatccgacgtggaatcgagctcatggataaaagcgaccgagtcaccaatgaatggctgaaggagaagtcacccaagcagaaagattcggaagcggggcagaccagagagcagctgatcaactctttgcgcaaaacgtgcaacacgcacgagaaaaagctgcttaacggtgtagttgacgcaaaaagcattcgaaccacattcaacgatgtgcatgtgccccccgagaccatcgaggccctgaagaccctgacttccctttcactcatccgccccgaggcattcacttatggtgtccttgccaccgacaagatccccggccttctcttatacggacctccaggcaccggtaagacgctcctcgctaaagccgtagcccgcgagagtggagcaacagtcctcgaagtcagcgggtctgaagtgtacgacatgtacgtcggcgagggcgagaagaacgtgaaagcgattttcacgcttgcaaagaagctcagtccctgcgttgtcttcatcgacgaagcggatgccatcttctgctcgcgcaccggagccagcagccgtacctcccaccgcgaactgatcaaccaattcctgcgcgagtgggacggcatgaacgacctctcagcattcatcatggtcgctacaaaccgaccatttgatttggacgatgctgtcctccgccgtcttccccgccgtctactagtcgatctaccaaccgaggaagaccgcgaagctgtcttgaaaatccacctcaaagaggaacagctcgaaccctccgtcgacattgctgaacttgcccgacgcactccgctgtactccggttccgatttgaagaatttatcggtggcggctgcactggcttgcgtgcgcgaggagaacgacgcagcggctaagcacacgggtgacgagccgtatagctatccggagcgccgaattctgactcgcgcacatttcgagcgcggaatggaagaaatcagcgcttcgatcagcgaggatatgtcttcgctgtcggcgattcggaagttcgacgagcagtatggtgaccggaagggtcgccggcagaagagccctgggtggggattcattcctggtgctagtggtgctgcttcggctgattcggcgcgtgtgcggacttgatttttgttttattcgaggttcctcgccggattggggaaatggggattccctttgtacttttagcgatactatagacctgtactattactcaaatgtatatactgccatccatttcttgggcaataaacatttgcattgtttctatccagatgccttcagatctagccttgaggtagtgactacgtggctatacctgcctgctagatttctaactgtaaacccaacacactttgtgcttgttatacgagtgtcgtttgcaaatcgcttggaatatttcttggcctttacatttggagtatgcctaatgcagcaaccctgatagagtaggcagagacattcgtgttgccaggttcctaccgctaaatttcaaagttctttttcttccttcatgatagaatatatcagcctaatcaggcagcatgtatagaaatagggatataaggcgagagaaattgctcccttctctgctcattgatctgatatatcctaactgcataagttcttctgttgcagcattaccagccccaatatgtcggtacgtggatctgctacaagcgctatatataagtactaacagcttgctttctgcagaatccatcggggtacatctacattcccagcaaaagcatccatggagaatgtgtcagctaaccaatgtatatcagtatttctattgcagatgaatgcatgactgcattcaatcaactccgatcaggaccagaagccaccaggccaaagttcatcatctacaagatctccgacaataacaagagcgttatggtcgaggaaacatccacggtgaaagactatgagttctttcgccggaagttgtcagctgcagtccacaaagatggtaacccagcaccacggtatgccatctacgacatggagtatgatcttgggagcgaagggaagcggtaagagattaccccagagacttaatgagtgtagtggaataattttggctaattccaaaaccgtatgtgcagtaccaaggctgtcttcgtccattggggtccttgccatgcgtctatcaaggtaatttgtctttcaactcgcgtggccatgaaatgctgactgtcttggttgcagctgtccatgctctatgctagcagtgtgcaacaattcaaaagagcctttggcctcaacgtctctttttttgcagacagcctggaagagcttgaatgggcggttgtcttgaaggaggtcagtgggggccagacatagatgggtctggggaaatgatcggcattgctaaagtcccgtgcatggagagggattgtttctctagagcaaagtaacaagatagaaatagtagtaggtgaggtgttggatatgaaatattgatttcgaactggcctttgagaacgtgctcaactagattttttgatatgccttggcaagggcaaatgtttgaagttgcatgatgccacatctgtactttcatcgaaccagctgccaaagttggtatagcgcgttctatcgacagggatttatagcaccaatggatttatagcactaacctggcgttgcgtcactccatatgttagattgaccaggcgaggtccctttctttcgatggtcttcaatcactttgtgttgcccattgtaagattataaacccagagtttagaacgagcgatatatatgttttagcaagatcagaattaaaacaaacagaccaaggacgaaagatatgtcaaaatgaaatgaaaatcaagggcaaaaagggtggaagcttgtatctccgcattggggcacgtgcgttatgacatgagtccgatcatcccgccaccctgactttgcaaagacctcccaaggttgcttgtttgcttgtttgctgctttgcatttcccaatttgcatctttcttccagttgagaacatcaggagtgcacggacaagcaagaaaaaccttcgggccaagcaagaaaaacttgctataaagctccccactttcccacccgagaaatccaccacatccatcgaatcgtgaaaatgatggccaccgggtctcgggacacctcggttcgtgaggccaaaggcttcgtcaaggatgtcgtacgaaatgactgggatttcgaggccggcgttccctccccgtcgtctgccgacggcaccctttgccacgaccgtgaagtgtgcgaatggcgggtccgagaattcgacaccccaacctcggaactcgagccacagagctcggacagcgagcaagagtatgatccatcagccgtgctgaacctcgccccgggagctgcaggtattgagcggcgtcgcaaacgccgtcgacagatagacgacgaaatggcatggaacgaagggctacggttatggatggccaggcgcgatgcgtggtgtggtgcgaagactcggcggcagattcgggcggaggaggaaaagcgcgcgttggctggtgcacggacggacacaacagatcagcccgatggcgtggggctaggagaaaatggtgagactttgtctgattcaacccaaactgcgatgccgcctggccagggtagtgagggcattggtgcctctgatctggcagcccagaccgagacttcactttccattgcggaccgggagaaaagcgagcagctccagaatcgagcggatatgacctcgggacagcaagatgatcaggaggatggattgtctaccgcgccagacgagggagttaaacggaaggcctcgtcagagaccaacatcacagagccggatcagaaagttgccgcaatcgtacctactgaacttacaacctccccggccgtggcaggccaaacagaagaggagaaggtggaagaagaacttgatgaaccactttgccccgttgccccaccattcatttcaaacgacaacccaattcgcgcaaccatcaatcccgcaatctacccttcaatctacaccaaggtcgtcgtgcaaggcatgaccccaaccgtccccgtcaacctcgcccacttgaccaaagccatggttcaaggctggaaagcagacgggcagtggccaccaaagccagcagtgacatcgattgtccttgctgatgatgcctccgtgcccaagaaaaccacagaggacgcaccaccgaccaggaggaagaacagcattaccaatgccgtgaagaaagtcttccattttggaacacatcccttccatcgccgcggcagccaggacaccgcgggaaccgggggcccgacagcttgagtggatcctactatttatggatcgtaagtaattgcatagccatcaacgctagtgcaggtcgaggaaatagcttcacctacctgggttgctctggcttcatcaggcgtctactctgggggttctattatgttttctttcgtgctcaaaatctgagcatgccgatgttttatttacttctagttctgcataatgaagaaatgccatctcaaaggttgtacatagtaaagtagttttcacaaattaggacctttttcgcgtcttcctgccgtctacttgagaatggggagaagatgtctaaaacctagaaagacatctaagaataccccaagtaattcagcctgtctgcagtatttctctaaaacaatcccaagacataatacataatattggatgttactacctagcagtcgagttactgacttccccagtgatcgacccgacatagacattgaagttataatgaacacagctatccttaacatccaaacctccttgcccactcagaatcgtctgtccattccgagtcacatggaaggactgggcaccaacccccatagtcacattcgaggtaaaaatccccgctggaacggcaatgctaacaggagcatcattcccactctgcacagtcaaggtagcgggattcgtcaacatggtagcgataaaaatactatcactgagcatacccacgcccaatggcgctgagagggtatcccccgtgcacacgacgcccttgggtgtaggccgataccagtacacgactccatcttcttccacaataggggcttttgctccggatttgtaggctgcgatatagggcttgaacaggttgcgccagccgtcgtggggcatatcggctgcccactgggaagagccatcgtcgctgtgattggctgagtacgggccgatgtagtgggattcaccgtagtctatataactttggttaggagagacttttccggagaatttccaggatatgtaggatagatataccattccatgagattatctcgatcaggcctggctcaagggaaagcatctgttcccagcgtaatgttggcaggttctcgcaaacgaagacccagtttttagtgttgaagtgcgctgagaaccagggtgagacggctgtcatttaagttagtttactttcactcagagaccagaactaggttcaagggttgctaacgggccatgtaagtcttccctgcgagataatgaacaaatctatcatcccagatggtagtcatcgggcctgggatgatactatttcccccgtccgtaggccaagccaaccacgagaaggcaccatcagcgctctgggcagcatccgtagtagcttccgcaggatcttggagatttggcaatgcgtaaatgggatttggcgttccttgcctcactgcatcccagttgaaactgtctccgacaaatgtacttaccaccgcagctcccttgtattgcatctgcgctgggtggcctgcatattgtttcatgtatgctgtgatcttttccgtatccccgttcgtccaataggcaaagtcgaaggagatgaatactttgaagtcaacttgctgggctgcttcataggctagggctagctgggttggggtgtagctgtctatgcttgcacagttcagtgcgaatgcgtcgatgccaatggattgggctgtggtcatgtcttctttccagtctgataactggtaattttctactataccgacctagatatataggatctatgtcaatggtgggaaataggaagtatccaggtgctagtatgctaaccatgaagtgggcgaagacatatttgtcctgcgattgactggtcaactctgaatcgggggctgggatagctaaagctggcaggatatgtgccaacatggccacagcactaaagagggatttccaaatcatcgctaaaagttgtaccagttcttaattgataagttgatttctcaatgatgtgaatttccgtccgtcccttaacagattatatagttcaccccctgcatatattatacgatattatacctcccaaatgcactgaattccaaccaaaatgaagcaagacaactaaaataccaatataaaccttgaacaataacctcaacggcgagtataaaacttgtttcacctttccccgcgctatattgtaacacccgaccttccgtcacatccacgtgagattgtgtagtattcgcaaaccgcgtccacttttgaattaaccctttgcccctgcagcatatggtatcgccgtcaggctcgggcccatatatcacgctctaaagaactcaatcaggtgttgagatgctacagtagtgctgagtatcacgagatgtattctcacatcaatctttacatgccaactgatcgaggcaaattaatatgccgggcatatgaaactcctgggtaaaactcgatgtatggattaacaccgatgccgccgtaaagtacatttgacaggtcttggcctgtggctttttcgctggcccatacgcatgactgaatttcggaatgactaaagaatatgtcatgcgtgaactgctattcaaatcacaatactatcagaacatgacacacgcattgtgctgttgtatttggtcatggtagcatcttgcagtcggcaggaacatcctccaatttgaagagaatgaatagcttctgatagagatgaggtcgtaataaggatgttgataacaacggaaatgatagtacaagatctctgatactaagattatggactcagaataatatatgacgtgttggatccgagacaggcaactcgggggttctgggtcatagcgatcaatggagattaaattccacggagattgcattccatactgacctgcatatccaggccagtcgagggtatgcggccctgattgatgttagactgtttgaactggactcgtttggcatagcccttgcataatgcatgattcggctccttctgaacattctcacctaagccgtcactaagagttgtcatgattatatctattggaggacctcgtacagtaaggaatgcattgaacccgaaggctatgactccattagagtaacaacattgtcaatatggcacagataacattattgattcctttttgatattcgtgacacgttaaactccccctaagaacgccgtgtatataaagatcgaacagaaataaccacaaggtcaagacaataactccagaaccgtcgcacgatcaacgaaacctctcgccgcatcttcgaaaaccttctgcgcttcactctgactagccactagaacagcaatctcaggctcgaccttgatctcctgtaactcatgaccgggacgagtaaagtagtacttatcctgatgacaagaccattttctgagatagagctggagatcattcgaagcgaggttgttcgccgtactaaagaattccgttttcctgctgtcgcatgacggcggcgtagaagggaatatgacacgggcactgctcgacgacaagtctatgtctggatctgtgctctgtagacatctacccacggctttggcgaaatcgcggatccactcgatgtgtgtcagaataccctcccctgcaccagtgactcgatcgatgtaatctaccactggtagcgctgaggagatcatgtctaggaaggcggcaagcatgactaaggttgtaggactttgcagacgatggcgacggaaggcgaccacacccagtgcttgacaggaggctcggcacacaacatcaatgatatctatcacagaagacacacaggctggatccagagtgtctatgttacacagcagggttttgaactccagtgtgatggtttgaatgatgggacggctgagaatccaggcagcgcggttgggaagcgttgcttcgagatacgctggaaacacgcattgcaagaggacggcgcggagagtaggtttgtcgtagtccccagcctcgtatgtgtgtttcatcgaggtgtgcaactgctcaactaggtagctctgttggccgtcaatggcagcgcgctcggaaatgctctggacaaacccggtcaaggtctggatctctttgctggaagataacttcgactcgtagcgtttgagcttcgcaacgatgtagcgagggtcggtagacggcaaagggaacgaagcagggtccgtaaagaaggggtcgatgggtttgatatcgctggtatgttgctgaaggaaaccgatcacgcgttgaacgaattcgacgtattctccttgagctgtctgcgctgttccattccctagctcttgatagttgcttttcatggaagtcatcacccgctgaagcatctcggagtactcctgttttgtcacggagaaatttcgattgccagaaagttccataccatagagctgctcacgcatattagacgataggcttgagaggagagataggcgccgagaaccaatttcctccaatgtgattgtataccggccaatcttcctatccttggagaacggaagattggcaagcaagggatctgtgggacttccattcaatagcgcctccgtcagacgatgttggaacttcaacatcgaggaacgctcgaccagcgacgacatccacatactcataacttggattcggcaatcagaaacaatatgcgcgtccttttcgatacatgtcgcaagaaacagcggtgcaaacttccttgtctgaactgtctgtcgaagccgcgtccatgaatcatcaccgaactcgctcagataattgtcccagtttcggaggccatggcgaatgagaacctgagcgattgacgtccagcattctactacgttgagaaggattatatcctcgggacagtggtcctcgccaaagcagttggaaacaagacgagagacaatcggatgaaaagccttctccacatgttcaataccttcaccaggggaactttgctggtcccagacagcttgaatggcatcccagtcaccgaactcctggctgtcctcatcagtattcactgccataggagcactcgatgtggatgtaactagaaaatctttttgggtgtacgccactaggacctgcagagcctcagatacaacgacattcacgcgcgggagcttcgggttgaaaagtgcaagaagagactcgaaaggggttctcaaaacaagcctgcgtgcatgctccattttcggagctagctgtacagcaatccgcagcccggtaagcgcattgctcaacaaagtctccacctgccgctggttctgggagattgtgcgttcaacaacctgctgagaaacccgattgtcgccggtattttgagcctcaatctctttgcgagcatatgaatgctgttgctgcaattccgtaacgaaataaccataccagtctccaaacgggtcgagccccgaaacctcctcatcggtagaaagcttgaatcgaacaagccttgaccatgaccgcaaattgatgctgcacgcttcacgatgtgaagtggcaggatggaccagattgcgtatcgtctccagtcgagggcgacacccatcaggaacagcccagtacagggtgctgagaagatcgtgatgatttcttagtgcctcaaggtcttcgtgctgcaatggctgttctttcgggtagacacggccatggttgggtaaaagacgccaggcaaagtttcgaatctttttcttgtcatatctcttcgccaagaagcggagaccacttgctacgatcttgagaaatgtgtggaaacacggttctcccactcgggcatccagagaaggattgttatcaagttcgtcaaggaatgaaggtgagccccgagcttcttcgagtttcaggttgtggagggtattcttagcgaagaagtcgaataatgtatccaggataggtttgcattctctccaaccccaagaattaataagccgatgacatctgaggaacaaggttcgacagtagatgttgtatgaaatgggttgtgccttggagtcagactcgaaatggtcgagggctggggcgagaaggcgtttggctaatatccaattgtcattggcagctgtcaactggtaaccaggacgtgcaatcccaagcggatctatttcgttgagcggcaagaccgtaaacatgccatgccatccagcctccaggctacccacatccctttcattgcgaatgattttgttgttgaaagtctcgagctggttatcttcaaagcagcccttgtagttctctgaactgcgtagaagatgtttggtgatgacataagcctccgccgaaggatactcatcgcgaattcccgactcgcggtgttcaggctggttgatttccttaagcaatgttttaaactcagaagaaccgactttcgatgcgatcaagcctgcaacatccttagcggatattttgacaatatccaaagcttcggttgcaatggcagggctaacgagccggtgagaagcaacttggtagatctggttggagaaaaccatgttgaaacatgcaatcttgacgagcccgctcttgttgtattcatcgctagtcagaaaggcagccaacgggtctctcacctgggagactagccccatcgctctggtgacaaactctgtacgatcaactgggtcggtgaaaaccagattttccgtgatgtatttgatcaacaatctgtataacctcgacgccacaccgagagcagccgtaatacctgtctctggggaggtgacagcacttcgctcaacattatcgataatcacatcaaaaacctgcccgatctctgatgatactgtatcgttccaccgactccattggaatgtctcgtctctgagctgaatggagaatgaagcggcatccccatcgaagtcccttcctgtgatttgcaacgaacgagaaaattctccgcttcctatgaatgtacttccatggaaaaatgtattgtcacgtagggatggtactccgaagtcgaccggatagaagcgttgccagttgaaaagcccggcgacaccgaacgatgggggacgtacatctccagtgtgcgtcatgataggaggttccaagtcatcggagactatggtagcaggatctggattctgacggaattcgtcggcatcgagattgattcgtttgggggggtgcttcttcaaccgccgtcgagatacagaggctttgggggttggcgtttgggttcttgcttcagccgagacggtagcggcggcagcagcaacagaagcattcatgggcgaggaattgcctccagtactcaatgatctactgtcggaaacatatcgatccaaggtcaagctgggcttgtaaggtttagatgtgcgctggtttttatagtgtcgattaagaagagacaatgactggttgaacatggcgggtaccattttctggtttctaccagggcctgccaaactggttgccgcaggcctaacggtgttcctcttcaaagatgttatagccacgttcctaggaataatccatgtgtgaccgtgctgctctggttttcgacgcgccgaggacacggccactgggggttggttcggtgggactgacactgcgctagattcgggtggtgcctgtacccgttcaggttccactgtgtttgtgctcgaaacaccagtgtctgcctctgcatcgaggaattgtatccggccgtttttagcattcgatttagctcgagcactgagaatcgaaagattcgttgtccaatgccggttttcaggagctctggaacgcggcgggctaatcctggcttgctgaatagctccccttttccattctcgcaaagactcatttgcatccactgtgtcctccctagaggccaatttcaagaacttctgagtaaggctctgcctgcctccatctttacgtgagcgtggtcgtcttgtcgctaccctgagcagtcgcgattgctctttgagaggcttcgtagcaacatctggcgcatccagtattcctattcgtggtcgctggacagcagagggtttcttggtccttcgtgctctatacgaggcatcggtcattcgggtttgacgaggtctcttcggctgtctctccccattgggcaaactttgtttcgatttcggcctttttaaactgttccttttgtgccgagaacctgttgggttgcgcagaacaggtgcagacatgtagtcgatgcggttatcctcggagatatcacccccttccagcgcgaagggatcttcgaggctaagagtgccagtcaacatctggctggattcattggctacagaggcatttcctagagcatcatttcgattgtcctcgtcgtccgaatcggaatctccaagatcaaacaagcctcttgcctgttgcgttgctggttgctttgagcgatcaccccttcgaatgagcttccgcgcaacaccctttccatccggtcgttgcgaagaagcatggcggtctaatttcaaggatttttctttgtcgttcttctgattcagccgagcatgtgacgcagggagcgctccacggatcattcgttggaatcgtcgaatttcacgttcttcagcatctgacttggtttcttcctgatcactctggctgttagacgagatggactgtacttccccctcattatctgtacccgcaccagctgattgaacctggccagcttcttgtatttcctgtgccctggactttgcaatttctcccggtggcgaccacccacgagggaaccgaaaccctccttccgaggcacgaggggttcttgaggtagatgataaacggcttgtgtggggtggactagacgacaagtcatagatggagacagcgttctgatttttagtaggtgtatttctgtccctaacaccacgaggtttggacggtttgtgtagattatgacgttctttgggagtcccggaatgagatgtcttctggcgctttgccagacgagcttgcgatggctgagtatgctctgagtcatggtgttcccgtccttgcgtggcagattgtgggccacgatgccgttcatgtcttactggcggaagatactcttccaagggaggacttgatggaggtgcatcgggatcatatgaatcttgcccttgactttcatcggtaacctgctttctttcctgtggcggtcggccaaaaggcttgacgccccgcgcctgtagttgctgcgcaaatttgagctgttccagatgatacgggtgcatttggatggcattgcgctttcgaaatgttctttgcgcggcatgcggcaattctcgaaatacttcttcggggatatcaaggtggggtaagacatcatctgggttggcatctagttcaacgagcactgtttgcggtagatctgcctccttatctatcagcgtttctgcttctgcctccatcataccatctgcgtgtatctctgtggaatcattggccgacggagaaccaaaggatgatggtaaagaagataatggggagtcatcttccgaagcctcctgtggtggtagtggtggtggtagtggtggcgcctctattggttggacacacttggccgcggtgtttttcttccgagttggctgaggggtcaacgccagctcgtcaggcgaggagctccgagtgcttgatgttgcatcttgtgattgggacgaccgtacaggcttcaaggccttcggggtagactcgcggctcgagggcttcgattgaggcctgtcatgttcctgtgatgacgttgggaaatcgtatatgctggtggtattattcacgaatgcattggtaatgtgcagctcgctgttgcggtgtttcgttgatttcgtagccgatgatcgaagtccgtaagtcttgcgccctcttcttgggtttggtgtcgtttcgtcatgcgcaacatttgtgaggtggggacttgttcgattcgtgtgtcgacgaactacctcctctgtatctgagagtgtgatagagccattctcggctcgaacgtgctcgcgttgtttcttcgttacactcgtcgccccttccttcggtgacgatgaagggttgtcgatatattcgatattctcgaccacgggactattttcggcattgccattcttcgcatctaaagaatcgaagccgtcttcctcgtccgagtcagggacatatcctcgttgtcgccatgattccatttgcatcctcggcggggatcccccatatctctaaacagtcattgggcggtctcagggcgatgaaaacgtgagctaaataaacctcgggttaaaattcgcgaaacataaggaaacaaagcgtcgaaaatctattcaaactgtctgaatgcagggcgtttgatcctgacgcgtgccaacggagcaatttagcagacgcgccggctgctaatcagccaactgataaccgatcttttgcacctccgcaacctccgcaacttccccaactgcaaatctcgctggtctaccccaattcctccgaaatgagtcgcaatctcttccctgctattttcgctattggcgtgggagtcttcacaggtaattataccccacagcaagaatggtataagtcgctgaattgatccatctgctctaggctactatactttccaaccgacattccagcaacttcaatatgagagacagcagtctcagaagacctcgcctccgtctgatcctgttgctctaaagcaggacaccagtgctctcaccaaatctgactttcagcaagatcccaagtccactcaatgacgttaaccggccttccccttgaagtggcactgggctgatctgagtatctaattgggaagacagtcttccgcctcaggttgacctctcttacctctaccaccaggtaacctactccacttcatatatacctcaacattatgggagccaagtctactaagcaatgtgagtacatctcaatctcacattcctagtcaaaccaggattcaattttgatgatatactttcccaggccctgcacctcatcccactgccccagttgaatctcacgggtctttccacgataaatggtcagcttacgtccagagtcaagttgaccaaatttctctgaatttcgtcgtggtggaagcgaagagagagtcggcctttgctcaagggtttacccagtgcttggggtatatgggcgggtttgcatgctattaattagattagatgctatgaatctgactcattggaggcattggctttgtgcataggctttgtggaagagacaacaagcaagatttcactgtctatggcgacgatattgtcaaatggtagtctaacaacttagcttcttcatttgtaaacaagccatgcatctcgatgtctctgttacgtctcctggcagcttataggcccggaagctctattcaaagcttcctctttacgttcggttcaacatctaaacacctctcgtcgacacatcaacctccaggccacgcacctacaaacaatcaatcataggcatgattcattagatcataaatgccaacgagatgagatcattctagctattcctgtgcaggaagggaaagctttccgccgtcacgaattttgcccaatccttttagggcatcaaccgacgtctttcgaggtaagggcaaacaaaaaccagacgccggagtggaagaagtcgagtagttccatcaaacttcgataatacgtagttatttaactcgttagtatgattttcagcaggtatgtatatgatacatcgcagtgcatagcggccaaccactagggttttattgccaacataagattgtctattattgtagagatgcgatatgatttgctaggattagagcagccacggatcatcaagcagctgccttgcggtcatgcgctcttcgggtagccacttgagcatagacctaaggaaacgaagaaacgattccttttcacagtcggagagtcgcatttctagactttctagggagtcctacggcatgaccgcgtcttcatgagcagtccaaatacctgcgataattttagcacgagtcacatcctgttaattagaactgaatgctgagacggaggtctttaccattgcgatcaaagcactgccccattgtttcactgcgctggataaaatcaggcagcggtgggctaatcaatgcgaccatcgacgcaagatgtttgaaggggtcatagttgccttcgtcatcgaaaatattcccaaatagatgtcgtccttcgaagagatcccaagtctaacctccattagcgggagtataagaaaggcttcaagcactactcgccaaggcacctatgttccaaatatcaacagcactccccaggtcatctcaaatatgatctctggggctctgtagatatcaggctgtacaaaaggccccgagttatgtgttttcccgatccttgcctctcctagatcacaaaggattggaagaccaaaggattggaagaccgaagcttttacctctcaaaggtcggcggaattgtcgactttgatatatggtacgcgttccatctatgctcttgcgcaggatcgggtgcctgatctctttatccgcaaaatcggccagcattgtagtatcctccaggctgagcattacattgtcggttttgagatctagttcacgttaggctagaattgattccctgtgttcgagaggagatgtaccagtgtgaataacattagcttcggtgtgtaaatagtcaagtgcgagtaataatcgcttaagcgtcattttgaggagaggtaagtcaaagggccttggatttagtctcatcatctccagaagtgtcatatacatcggttgtaagacaagacaccggtgactgccaccatggccccgaagctcgaaggagtcatatagctcccgaagcatcgactgtcatgggtgtgataaattgatttttgcaaggtgctcgtaaacccgaaattcgcgatcggtcgcattagggagacctcaaagtgatgtagatacctttagtacggcatagctttggcttctgagctagtttagcggtaggttttcttaatctcgagtggtcacgtactgaatatcgtgacatagccaactcgtcgagtgggctccataaccaagcttgccggtgacccgatacctatcatcgaatacctctccaatgcgtacggggtagaattgcctcgggtcatagtgaggaagcgtctcctcgtcgatgagggtttccactggcaaactgacgaaggaccttctagaggtgggttgaaaggatcgatatgctattctggaggcagatatgaaggcgttcagtcgtgaagtcaagcgtgaagtcatgcctgacgtgggtatagcaaggagacaggagagcgttcatggcaaatgacagctcgattgccgcccttcataagaccaggagcacgatgtctggtcacatgatcctctgctagctgcatatagccttgaccttgacactgtccccgtgagtgtactgcagtccataagtgtggatgccctggctcaggaggcattgcagcgctgacgatgcaatatcgccctgagcatgggatacgatgtgctctcagtgcgtgctcattaatatatgcacaaagtagtgttaatcccaagtgtcttatactaggccagagccctagttctcctagtctcctcgtcgctaaattggcggccataaggcattatggcattaggttagggcagatcgtaacgtcttaatagggctatagtatatagcatcaagaaactgaggaagtgcctctcgcctgttcccaatgcaatatgctttattggagatcggctcttccccacattccaagcctggcgcacgcggcgccatatgtttcgctgggctacagtcgttcaggtattgtggccgttgtacatataagactggcacaacggcccgtttcgaagtactggtagatagtactgtagtgaggctttccgactgattggatataaaagccagttttctcggcaaatccatgtgtatctggaaatatttgaaacaaccgatgtattgcatgacctttaaaccttgacatctggaagatacatgttttgagcgccgttcgcagcacacgcagaaaatcaaccctagtcccttgcaatgataatgtagtccattcccgaataccttaacagaaaatccccccataagcgccaatttattgtagtttctgcatgtaaatcaaacttcttcaaccattttccctgcaggaactgtaggtgcaccgaacacacgcccagtaggtgtccccagccattcttctggcacggctactttacagccatttgaaccgctgatccagcgtgccatggtagggtcggctttatcggcctccgcgccttcttggccgggggtgccatcggcagcctcggccgcagcagctcggccacgccgcttaggggcctgcttctttagcagtcgattgattgtgtccatctgttgatcaaaattagcggccgttctccaatggatatctcgaaggactttttgcgcataccttctcctcttcattccgcttctcacttaggttcttccttcgccgcgccatctctgcacgacgcatctggcgctcctcggcagtcaaatgcttcttgacctggggctctatttttttagttagcttcggtttggacaaatggttgatcgtagtttcccacccatgggaagttgcaagaaatcattccccagatttcctcgctggcgcttggtggttttgccactttgcatagcgagggcatcactatccatgtcgtcctctattccatcatcatcgtcgagttcatctagatcatcaacattgacgtctgggactgcactttcatcctgatcttcaccctcggcttcggcatcttcatccgtatcggagatgggctcttcctcgtcttcttcttcctcttcgtcttcgtcttcttccattctgatctccttggcctccacactcttgggcggcttggcgcgagagggaggggtgattttaccgcgcctggtaggcgcctgaggctgcacgtcatccatatcgatgtcaccatcagcgtcagcatcagcatcgtcatcgtcatcgtcgtctccaggtgcatcttcatcatcaacttcgtcctcttcttggtcgtctatttcttcttcgtcgcttgtagcaacttctacaatcttctttcggttccgactggagcggggtcccgagacaataggatcatcccgaaacacattgactgagcgccgtccagcagagcgaccagcacccgtagcttcccgcaatttgctagaggccattttgagagtaagccggagagatctctttcgatctcctgaattcaatgaagatcgagagatggaaactaaagcagacgcggaaacagatgcgcgagtttgtctggtagacctggtggccatgttagcctctggctctggggattcatcatgtgcctttcgcgatcgaagggatcgacggggcgacatggtggcggttttatcgagtgtgacagaagtcgttgggaagggaaaaatgcaaaaagcagaacagcaaaaggaagcgggagaaggagggtaagtgtgtggcagtaggaacttaagccattaagcctttggcgagaggggaaggtctggagagagaaagagggagagagagggaaggagggatgtccaatcacttcatccactgagtgagacgcggagttgcaaaccgggaagatacagattgcttttctatacgggatgtttccactgcgaacaaagcgccgttacagggaatcaggcttggggttgtttctcctggcttctcttgggggcgtgtttgggggctaaccccgggcttgggcagatcggaaggcacacaaaaacaacaagatcaacgggggaaaacgccatactcacaagtacttttctctaaagtttcaaattctccaggtgtccagtcgctgacgctggatgaacgaatgaagtactgcacggtccattctgccgggcggtatcgagtatatacggatgccattatggaggattgtggtgatctttcggtattcaattgatctcgctagatataatgtataaggacttattgtagaagacactatagccgtcaatagaacccgaaagtcaggtggtatggcttcgtctcacatacaggctattttcggtgaacaaggtactttggatattcacatctagcgccctaaatacatttaaaatacaatatttgccattcatattagattattcttcaatatcatattctagtacaacgtgaacaattatcaatgtgatctcaagatgtacatgtagttatggcaaatatcaatgcctgaggtgtactcggccttggaacagccgaggtcgggctcacatggcaagtccggggaaggttccgtctcctctttacaacaccaacgcctttgctttctcatatctctggcaaatgtgtcagatacctcatcatgcctgacgacacatctaaaacagcatctattccctcatggcagaggcccaataagacggccgaggagtcgccatcgccgacctccgacgatgcgcccgcaactacagccacacctcgacaaaccctcctagaccaagcatccaaatttctagaagacgagtcaatccgcgatgcaccaacagagcgcaaaatctcattcctcgagtcgaaaggcttgagctcagacgatatcgagcaggtcctcggcgtctcccgcaatgcagagacgagcagcagttcaaccgcacccaaggacaagacaccggaagagacaccatctgcctcgcccactcaatctgaagccaccccttctcctcctagcacctcctcgccaccctccaacaccatgcctcaatcgcgcccagcaccagcgccaactcccgcctcccgcgacgtccccccaataatcacctaccccgaattcctcttcgagtcatccaagccgccaccactcgtgacgatgcgtagcctcctgtacacactatacggcgccgcaggcctaggagcaaccctctacggcgcaagcgagtacctcgtgaaaccaatgctagcgagcctaacaagcgcacggcacgagcttgccagcacagcagaagtgaatctacaaaagctaaacgacaagctagagaaggcagtatccgtgatcccggcggagttaacggcgcgcaagagcaaggcctacagcgacgaagaagacgacgcctcgtccatcacctcggacccaaccgagctgttccacagggacgtcgcaacacagacgagtccagagccaactccagtacccagtactgctggcccggtggactcggcacccatctccccctctacggcggtcaataaccacgtcagccgcgttgagtctattacctcgaagctgcgcgagatcatcgactcggagaagggtgcgagtacgctggatgactcgatgagtacacgtctcgcggatctgcatcgttattgtgacgggttgatttacagtgctcctgcgtactcttctgggtcgacgtacggggtttggaataccaataactcgggctcgagtgaaagcactggtctgcggaagggggaggacgaggctattgctgggtttagggcggatattcgcggtgtgaagggtgccttgttgagtgcgcgtaacttccctactagtcggggtggacgtcttcccatcggtggacggtgatggggcatcgtggggttttggtgcgactgtacgaatgtacgaatgtatatagattgcaacggattttctaagtggtttacttaggtatacctaggtttatacagtctgtatcttcattcatttgattgcatctactagattataacgagggtgctaggatatatattatcatgatctgtaatgcgaaagccatatcctcatttgattcatgtctatctagcagtctgtgtcagaaggtaccatatagcgaaataaccgaccatactcaagaaacgtcggaaatatttcgctttgctcatgatcagacttatgccgcaggggagaagaggaacggaggaaaatacgcaagacattaatataaaatggacaaggaagatgagaaaatttcaagcaacgctgaagtatagagaaaaaaggccagaaatacataagttataccgcctttaacattccctcaacttgacaagaatcaaatgtgtcatttacggagtagcgccgctcatactaatcagtcgcttcacaccgacctgttgttatacttgttagtgaccgaccgtttagtatcctaggaccaaagttcactcaccatccaattgccacattcgtcagtccggttggtcatgatatcaacatgaatagcgagggcggtattgtaatcacgttgctggagtgcacgggccaagttggccatgtcctcgatggtgttcggcttgagcaagtcctcgttgttgaggtgatcaaagaggatgttcaagcggcgctcggcatcatcaacctgtaccttgaatgccgcgggagcccggctcttgacgcgctgcatgtctgctgatagaatctcgaagacaggctgtgcgtttgcaggaatatgtgaacggtcaccgggggctggaataagggtcaattggctggaagtaattgtttgttaagtggtattactcacgatactttggagccgcaggagttggcctctgcgactgggctgttggaggtcgaggtacttgagacggcggcgggatgccctgggccataggtggaggctgtgtagcaataggcgtggtgggtccgtatgggtttgccgcggggggttgtgagaccgcttgtggggcgtatggtgaggcaacggcctgaggagggggagcaaccgggccacgagtgtgcaattgcgggtttgtagcctgggcagctgggctcggtgcataccgattggttgggggtggtatgctaggaggagcattgtagggcgacgctccgcgaggtatggacgccgagggacccatggttgacccctgagtcaatgacggtgactgagggagagaagcgtatggattggcagggggcggcggggaacgcccagggacctgcccaccggatagcggcgacatcatacgcggtggaggaaccgaacccgccttcggtgggggaggcacggatggtgcgcgcggagcaccaaccgggggaggtccctggaccagattcggtgactggttggggaaaggagaagcgatgggtgcagaggctgcggcaggagttgaacggcgaggtgcaggagccttcgcaaagccttctggcaaatcattccatgcaggaaggccagtggccgtggtgtatgttgtgattgtgttggctggcgactggttagatgacgcacgaggaggtgggggaacgccagcacccgtgggctgttgtccgccgaatgcagatggtggagtataactggtaggtctcatgccctgggttggctgataaccagttgtcgatccataggcgcctcccgtcgacatagcagcgtaggggttgctgggctgagctaccgaggtcgttggagggccatatgggttagcctgctgggaaacagcgggcgcagtaggcgcataaatgttaggagcagcaaccggtgttgaagtagcagcaggattgtaagactgctgcggctggtataaactgggctgttgcgggaggggcttaaaggcaggtttggctccgacagaggcttgggccttctggggtgcctgtctggtggcaagcttgatgcggttgcgcgccacctcagcttcagggtgcttttcagggacaaggtcaaggtacttctgagcaatttgcaaacgtccatgggtagcgacaacatccgcatattcaatgtacttgtcatacaagacactcaagcgccaatccgagtccttgttccgctctgtatcctggaacttggtgacttggcggaaaatggtaactttctcgatcagaccctgtagagcacggacatggatagagaaggaagagttgtcggtgttgctttcaattcctttctgctcattctcgcgaagctcctcgacccaaatgttaacaaccttctcaagcttcgagcctgccaaaaagcagaaagaagcatccttgcgggcgctcttatcgtcgctgttctggacctgctcctctagccggtcaccgagagcatcacagagatcagggaattccttctcgtcggcaaaggtacacaaggcagccataacttccttccagttggacaaatcggcattatgcaccacatcccacaggttcttaccgacaatagatgcgagcaagcgcatatagttcggaccgccggcctgcttagagaagtagtactcctgtgccttttcaatgcattttgggccgccgcaaatagcaatcatgaaagcatcggacattttatcctcccggagggcaacgtccagagctttctcaaactctccaaggagcaaagcccgagtaatttgcttttccgcctggctttctgaaccattgaaaatttggaatgggttgttggtttgagcacccttagaagcagccagttcagaaaggaagctgtcaccttcgggattgggatcgaacatggattgcaaacgcttgtgcttcttaaccttagccggtttggcggcggcaccgttagtgtcctcgccttccttcttgtccaagccaagctgcgcaagactatcagcggcctcatcagcctgatcctggaatcccaggtactctaccaagcccttacgtgggttttcggaaattaaagcctccatcaccttccagtctgctttttctgcttcgttggaagcacctgaagcgcgcgactcacagagagtacgaatatcgccctctttcaacgcagtctcaaagctttcagtagcattgccaacgctctcatcaacctcgaacgatgtgattttgacagtagatgtacgtgagcccttctcagtcagaccgaaggaaacgacccgacctccgaagccaaatgtagcaccacagggccgctcaagccagcgaggggcctttgggagagagaacttggagacttggggctgcgtttgcgccttattaaagaagtcttcgccgtccaaggcttgattgtgatcggcgatggcctgggaattatcggtcttcgtgttctgcagggtctggatacaaatcttgccatcaaaggacgcggttgcgaagaagttcgggttgtgggggttccagcgggtctggaaggtccagttcgtgacaatggggaactctccgtatgcttcaccggtttgcgggttccaacagatattacggttatctttgccgcaagacagcaggagatctggatcatgctcgcaccaagaaagcgagagcacaccggattcgtggccggtgagtgtctatacaaataatatcagtattaagtcacatctgggctctgatagagtaacctacccgctccggggcgtgggagttgcgcagatcccagacatagagcactgggtctgactccagcggtgacgatgtaataagctttgtgggctagacgtgaaaacggtcagcaatcctggaataactacgtgggaagtgctaacgtaccctctcggggtcccatgcgactgcgctgacagccttccgggccttgttgttcagtgtcagactctcctttttcgtcttgacatcccagaccgtcacgaagccggagctgctaccagtgacaagaatgtgaggaaccttcctgttccaatccaagcagtcgatatcatctgtgcgggccgcgttgttgcccaaccggaatgggttctcgatgttgtttagatcccaaatgaacagctatccagcaattagccacatattcaacctatcctcaaaccgcagcctacctctccctttgcgccaccggtagccagaaggttcgggtgtttcgggttgaactgaagggtcttgatggcgccgctgtgcttagtggttcttgagatcaacgcatcactgaaattgaacgattagcaaatgtcaccgggatctggttcgtatgtagagttcgaccaacctggatccagcaagtagcttatcagcatcccacaactccagggagccattctccaagccacccgcaatcacaccccgtttgttgtcttcggacgttgtccaggccacatcattgaagctagttacattaatcggtcagcatgctcatctccattcaagttcctaaaagcacgcttacccggactctgtatcgagcttagctatgggctgcagctcctcgctcgcatcttcacggtcaaggcccaaatcccacagttcgaggcatgtcttgttagagaagtcggcatcgacagcgccagcgcgagttccagttgcgatcaatggcgacgcagcgccaggcgaccaggcgaacgtggccgtccttgggatttccctcagacgcaccatgatgatggcaggggaggtatgttttggtgaggatcgagaccaatggagtatgtgaaaggtatcacccgaggaatagtgaaacccaaataaatagaaagaagagggatcaagaaccaccccttatgaataattgacaatggggtgatactctagatgttccaagtatagcagtaaccaagtggcctcctggacttggagggaccggggaacgcgcgctagaccgcttttagactcgccaaaacacctggcacttctccgaggtgagctgcacgtgatatcaatctttcggtctggtttgatagcaacgtacagcttggtttcagagtcttgaacaaaagttttttttgccgttgaactccctttcccctcacatcttctactatccgtgcaatctcggcacatagccgcccaaatcaaagatcccccaatttgacccgaaccgcaactacacataatgagcgaaaccacgcggctcaagagcaccgtctacgtgggaggtcttgaccaaggggtgaccacgctcacacttgcggaggcttttgttccattcggcgaagttgttgatatctcgctgcccaaaccggaccaacccaactcggccgaagttcaccgcggatttggatatgtggaatttgatctgccgcaggacgctaaagaggcaatcgacaatatggatggcagtgagatctacgggcgtacgatcaaagtcgccgctgcaaagccacagaaggatgccaatgaaggactaggcagcaagactgcgatttgggagcaggttcgttgggatcgatttcatatctaactgtaacctatactaaccgatgcattctgtaggagggttatttggccaagcatgccgtcagcgaggaggatcgggaagcggcagaggaggctcaggctgcaagcagtcgtccgcaagatcctatgcagggattggaacaattagatgttgctgggccaaagcccgagtgatgcacgctacactttacgatagctacgacgaagatgacaaacaaaaagcataagtcctaatttgccaattacaccatcaggattcaggctcggacagccggaatatgtacacgggctgcaatttcgagcccattccatttcttctccattggtctttctcaaatcatgcccatcggcttcaaattctcctagttcaacaatacaagcggcaataatccaaaaactgcgcgtcgcattctgagagctcaaagaaacatggtggtacatttagtagtcacggctctcggggctgttgcggtggagacgcagggtcttgtcggtcagcagcttcttggtgcaagagtagacagcagcgctaagggcgacactaagattgcaagttagcatcagggaaagacatgtggttggttgccagtaaagcgatatagcgtgataaaattccggcatgcgtcgggcatgttttcccggaatcaagcggaagatagtatcaaagagggagaaacatacgcgaggacgaagcctaacaaacagaccgttagcctaatttccgaccgcaaaatcatgactatagcacataccaatagggagcaactcggggggcacacgcttgagctggcgcagacgctgggagatagtgtgggctgtaggtgaattgttagttcaatggcagtccccataaaagtaagtccattttatatggctccgtcaatcaccatataggtctagtgatctcagagatacataccactctggggctccttctacagacataagttagtaaccgagggatcgtatgatcacaacaccattttcgagggaaagaacatacaggagtagggaaagcaaaggcccgagtgggctgcatccgcagcatgcgagtgggatacatagcgagatatgtgattcaacctggagtagcagacgaagagtgggatagaggacgaggttggaacgccagcttccgagaacgtgactggctcgggtgtaaaagcgagacgctcagtggctctcgcttgaccgcccgcggtcatatccggcacttcacagcttcaatcacccaacgtcgctcttcccggctcactttctcccctcctctgtttccactccactccaattctttttcacgtgtgtcgtttctctcgaagctacacatcgcaaatatgggtgctattccggaagccgaccccgatgaggtcctcgagacaaagcccttcaagttcgtcactggtaagtccactaccccctcccgagaaaaccggggcctggagccctacggagagtcaatggctaatttaattgtagctggtgcgtaaaccttgatattttccctcgtctttcgctcgtcgcatgcgcgtggaccgattttgcccgatcggctgatgtatggtgtaattgacaattttcgattggatcgcaggttacgatgctcgtttcccccagatgaaccagtacgtgataagcttttgttttggtacctttttttatttatctaacttggattcacttcacaggaccaagcactgctggcagaactatgtcgactactacaagtgtactactgccaagggcgaggacttccgtccctgcaagcaggtaacttcgacaccgacaatattctcaaatctcagcagcttctaacggcttctctctcagttctaccactccttccgctctctttgccccaaggcctggaccgatcgttgggacggtcagcgcggtacgcatctagaagtctcctcttgatatatgcttattcatactaacttgtactaacagaggctggcaacttccctgtccaccttgacaagtagataaccaacagctgtttttggttggccaagtgagccgtgtcaaattttatgtatcgacaagttccaatgtactctactgggtcacgcggggacacaacccctatatttcctaagtcgttccatccgtataaggcagagagaaagttcataaactagtcgtattgtaaaatcatttgtgttgtagttagctgatgcttgttctgacctttgaagcgtgagcagtcgcaacatatctttcatgtagacgctcgcagtcattgctagctgggaagataacttagaattgagtacaatccacgcgtccttgcggaagtgcgttgaatgcgattcagtgtgtatgtatctaattctatgtaatcccagttccgacaagaaataatacatcatccagcacactgtacaaggccatggggccatgtaatagatatgccccaaggccgtctccggccgttagtcgaatctctgatgaaagaaaacccgaaagaatgcaagctatatacacgccaaattgaaaatggtgtgagtcagtctcaaggtgcaacacatagaaaaccagagagatgacaacaaatcgtatataccgaggatatatcggacagaggcgtagatgccgctgtaagattgggaagattcggcagggaaaaaagtacaaaaaggaatggtcactctttgtatctttaaatgcccttcagcttgcggtagagtttcttatgctcttcgaggaagaggaaagtggcaattgtatggggaccaagacggatgaagctaggtacccagccacggaaagtccatccaaggccttccttacggcagatatcacgcaggagaccgacgatagtatgaccaccgctatccgcatgagaagccgtcataatacgagtcttgatcacgtccacggggctgcaggcagtggtagcaacgaatcccgccatgaacgaggctgtgaagtgtgtgcctagattatcagccatgccggctttctccatacaaagacccttgaaggtgtcgtaagtagctagctgcgaggtagtcataagaatcgcgcgggttgagttaggccatactccgcggaagagagaaccaaatccctctgtccgggtcatctggatgagcccatggattgcgtttcggtagtttcgtcgctgggcgggagggagggacgcgtcgtgttgcatgcgcacattcatcacatcggccgggttgcctgctatgccaccgatgaatcctgaagcagaggcaatgccgatgagagtaagcaggcctggtgcggcggctgggtctgaggtgggcgggctaatgcgtgacttcaattcttcgtagataccgaaacgcgtcgtggagtatgtgatctgacgcagcatcgcggctgacaactataccatatcccatccgtccttcgttagccaactgtgcccgtttactgtcatcgaccggattctagggtcgcacatacaccactatataaccccgtgacgccattgtgcttcaggatgtgcacaaacgtcccaaccatattctttggtccatcgggcgcacgagtctgtaaccggacctattgcgcaagaaacaaatatcagtgtcggggcttggaatcggggccacgggccattctctcggacaaccggctaggagctcctaaataccttgactaagggcgtagagttagcagatagtttataatcgagggagaaataagagcatacctaaatccaaggggtgcgttacggccgccgcgaaacaggaggccgaacctccaaaccaaaacgggtaatgcacctgcttcggctttgactgcgcgggctgaacgggcacgactcgggagtgaggaggaacctccaacatcttgccgctgtctgccatcttgctaggaaacaagacccctaaattatacacgcacaaaaaaaggcggggagagagtgattcaaggggatatgtgatttattttttttactggtcttttctcggcttttacgaacgtgacttgacgtaaatttttggccctttaaataccgacggagacaaatcagacctccgaaaccactcggccagtcgccgaacgtgaaaggcagccaatcagatcaagcgttttgataggggctcatcgcttgcaccaatcaccttctcgggtttgcgccgaacaatatcttgtatggaacatacagtccctcaggcaccctggatatcgtccttgttcggtcgttgaaatggatgccgagggtatcttaatccataccgccgtcgtgctaattgcttcaacagagctgttatgacgagatcggctatcatgcggatcttcggagtttttacggatgttgggcggttggcactggcgtcggactaccgagtggttctacaggacaactttccgatgcatgaaggctaactagacgggattatggttgtgatgtgatcagggtatagaaggtataaaatatctacttcagtttaatacgttgtttcgcagctgtctcggcgagggtattcgtatttagtcgttgtcgcacaggaaagaaaagccaagagctgggataggatgtattatcagttaaactacttgcttttgttcggagccaagtaaatacagtagaagaggtgtataacttataaagcaatgcaaactgcatagtacatactccgtagatacatagacaaccttcaatttagacgtgtgaaggttaaaatggctcggactaccagctgtagcaactgtaaataaatccaaatacgcttaaatcataagcctcttctcctagaaagaggtaaataaatgctgcgttgacataactcgttgtccagactcaacaaatacacttcgggaactaattttgccggcccgaacatgtgttgatagtgttgatggacaaccttggaattctcacaacgtctagctcaaccatgagactatttgctactggtcgagccctgcgtgcgagcagtggccgttggtcaattgcctcaatccgaccccaaaccgccattccccgctcgctcccactaactcccattctctcccgcaaccgcgaatggagctcaaccgccgctcgccggagtgaacagaaagcaaccactacctctaaaataccccagcaacaatcgagcctcaaaatcgaaggagagacctacccaaccgaccagtggaccaacacccccgatacaatcctatcccatatcggacgacgactctatctcgacgagaaccaccctctcgccattacacgcaagctcatcgaaagccaattcgcagccccaaactatggcaactactcagagaagaacccagtcgtctcaacgagacaaaacttcgacgtcctcggcttccccgcagaccacccgggccgcagtcgcacagatacgtactacgtgaacgacaagacagtgctgcgcacgcacacaagcgcccaccaacaggcctacttccagcaaatcgcccgcaacgagcatacccgcccagaggaggtcggatacaccgtgatcgccgacgtctaccgtcgcgacgcgatcgaccgcagccactaccccgtcttccaccagatggagggtgcgatgctgtggaagcggcccgcgacgaacccactcgccgcctcggccgaaacagcagcgaggatcatggcggatgtggagaagatcccgcgccacgacgttgtggtcgaggaccccaacccgactatccacacgcagcggaacccgttgcaggacgaacaccacagcgccgaggaggtcgaggctgtggctgcgcacctcaagcgctccctcgaacggatggtcattaaggtcttcacggaagcgagcaaggccgctgcggcgagtagcggtggtgcggagcaggagccgctcaaggtgcggtgggtcgaggcttacttcccgttcaccagcccgtcctgggaactggaggtgttctggcaaggggactggctggagatcctaggctgcggcattatcaagcaggatctgttgatcaattcggacgtgccggaccggattggatgggcgtttggactgggcattgagcgcattgctatgcttcttttcaatatccctgatattcggttgttctggtcgcgggatgagcgattcttgtcgcagttccgcgctggccatatcgcgcgcttcgagcctttctctaagcacccggcttgctacaaggatgttgctttctggttgcctcctgcggctgtgacgggtggtaacagtgctgctggtggagccgtgcctttccatgagaatgatgttatggagattgttcgtgggattggtggggatcttgttgaggatgttactctcattgacgagtttacgcatcctaagacttcgcgcaagagcatgtgttaccgcattaactaccggagcttggagcggactctaacgaatgaggagagtaatgaaatgcatctgaaggtccgggaaaagttagttggggagcttggagttgagctgaggtgagtttggagattgttgggctatactttgtactatactgtgattattatggagaacatgtaacatatagcattcctctcattgaaaaaatcgatatatggataccactcaagttctaataggtacagactatagctagctttgtctttgattagggtctaatttagggtaccgaaggtggaaggataatgaagacactagaggttatgacaatgcctctaagaagtgtgtattatacagtgaggaggagagaattatcaggggacgtagagctgcagacgtcacgaaacaagtgagaagacaccaccaacatgagacattccgtacgcctccagacacatgcaacaagggcgtatcatacagccgagtcaaagagacgagcagaagatagtaaggaatagtaattttcctgggtccaaaagccagccgtatccgagtataaaaccctatcgtgatcatgatgtatgacatatggtacaaagagaaggaaagaagagtgaaaaggcaggaaggtcgaaggattaagaatcgaagttattgccaacgatttaagcgttcttgacgacaccgaccttggcagcctgtaagagaaaagaaagcagttagtcaaaatattccgcaagaactttggatcttaggggctagcactcacccgcagaacgcggccgttaagacggaagcccttgctctgtacgtgcataacatcaccatcctcaagatcagcagccggagccatgaaggtagcctcgtgcaagtttgcgtcgaacttctgggccttgccgtcgaccttctcgccggggtcgaagcgctcgaggccgtgcttctggagggtgttcaggaggatttgctgggtcatgttgagaccggcgacgagatcgaggaggtccttgttctcttcgttcttagcagcgctgatcttctcttcgggcacagctagcagcgcgcggtcgaagttgtcgatgctatcaagaaggtctttggcgaaaccctggatggcgaacttgcgggcggcgtccatgtcgcgcttgttgcgctcaacaaggttgcgggattccgcgacggagcggagccatttgtcctaagaggaagttttggttaatattcatccgcgaaagagttgcggagctacccgtagcagtaagtatggggaaatagcttaccttgaattcaatggcttcctttgtcttctgttcgagctccttcttgatgggatcctcggcctctgcgttctctgcactctcagacttctcggctttctctttcgcagcttcggtagcttccttggtctctgttgaatagagacgggtagaccgggggacgaatggccggatagccgggatacgcggttgttgtgtagtccgtcgcagcgccagcgatgcggtggagggggaagaggtagagaggatggagcgcgcggcctgagcctgtctgaggagggttcgttggaacattataaatgatgatgtgtggaattgagaatagagactcggtgaatttgaagcggaaccatttgtcctcggacaaatttgatcgggaatcacctgaccttggcaaggaaaaacgctgggccgaggggatcttcttttgacttctctacggagtagagctattacgtatccctaagcttgggaagtaccttatgtattgacttgcaaatatcgcccagtgggctatttgcacctaccccgagcatacgaaggatgtatactttattgatcgcctgggcatgatagtccgttctacttttgaagcatgatcattgtgacatgtcgctcattgggttatttcgaaaacgtattaagctatgaaagacattcctggaaaagttcgaaatgattctcaacagctcttctgggatcagacgttcggttcattttccgcatgggacataagaattcgcgtgatggcacggccttcctctcgatgctccttcacgttatagtccaacccgtaggcgagtacaattccccattcagacatgaatctcttcgtcaaccaacggttttcggcccatgtaagcggctctacgccggaggctcgcatcagaccggaggccatcaaggcttcaaatctctgccgctcatactgggaccagaaggcgtgaatcatgtagcgcccgttagagcacaagggcgaaatcccgaactcatggccgagtggaggcgcgccaagttggacttggtacagcatggggccttcacccataggcttgaagtaggctgcaatgcgaccattggtgttctttaatataaaaccggagctatctggggcactggagtcgcatatgatagtgtagtcgtcttcgatgggccttccgatgatgttgcagagcattgctggggtatggagaacgttcttcaagcagatggagctatgcgaatccagatcggtctgggttggtaagctcatggtggtgagattgacagttcccatcccaatgacttcgaccatgcctccagctatatccgtgacataagacctgaaggggatgtagtctgtaccgaaccaacagcgatctttggcagtactggcctagttagatggatggatttggccctgcgaggcagaaaatactcactgcgtgtctgagttgttggaatagacccaggagggacatggaggaggcagtctgtcgggcctcacaggcatcgatgccatggcgaagcaattattcgaagacaagcccgaggaattggaaatgacgttgagaagttcagttgcgattctagcaaatccagatacagagagatccgtattctgtcttcgccagatgaagtggaatagggaaggagcgagatgagagggaaccagataggaaggaaagaaggaacgaggaagcagcccgaatgggtctgtttgtttgtcgtgcacaatcgcttgcccgggaagtcactgtatcctcagacctcaactatcttctccatggctgcattacaagtggacaatattcactgccgttagggaccaaggatttctcccttatagacagactcggcattctacactgtctcccagacgtgaacatgaacaatggccaatcccatgaagtgatcataatatgcgtaagctatcacttatcatatgaatgaacaagcctgatgatgctagttccgtcggctaaaatatgattctcttcctcgagtttatagcctctccatcgtgggagtaaaactgtccagatataccagtagagaaccccagagagcatactgtgtttgttagcgaggtaaatcacacatagaagtattgccactcacattccaatcccgacaagtggataggttgcatagaagagatcgaggtcgcgccaattcggaggagggacgaatggtgctactagcaggattaaacacaccacaacccgtaaccagacagccggcaaccacgctttgaagggccgtggaagatcaggctcccggtatcttactataagcagaccaactgtgatagccaatgcaaacatctgtccaggatatccctccaagtccaggataaagttatagacgtccccttgtggtggtagggcgaggaccaacatagaagggatatagtgtacaataagtccccccagtggggtcccaaatggtcgcgaagacgatagaatgttttgccatggaagaaagccttgtcgggctatctcttgattcacacgcgcctatcaatgttagcatgtattggctttctatgcaatatatccaaacgtaccaagccaaaggtcaccaccatcacattcccggcagctgaaatggcaatagcaagtggaaagaatatcttcccaacctgatccccaaataatctctcgaatagcagtgcacccactaattccccgctattcttgatctcttcgagcggaatgacaaggaagtatgaaagattcgcaagaaagtataggcccccagccgtgaccagcgcagtgggacacacggtcttgactatattcacgggatcatgaacctcactgaggacattgttcacgttgctcaagccagcgtaggaatagtagactttgaacaaagccgacgaaagcagactccagctccagttcgatccttcccacaacgaatcccaagaaaacggaccaactctctctacaggcgataagttatcagtatctccatgcaagccgagaaaaaccacccagactcccgtcaaggacatcgcgccgatgaggaagatcttcacccagccaaggacattctggacaaagatgccagttttcaagaaacaaccatggacaatagtaatggcagtcaagaggccaacagcgagtgccttgtgctggatttcggtaggctcaatactcagcgcgaagaacgcgtattttgaaaagataatgcagttgctcgccgtgaaccctaggagcactacctgagctgttataaggcttgacgcgagaaagcgcggtcggggataggtatactcgaggtacacctgcacggaaatgagattagtttagccgacttgtttctgctaatcctgctgcaatgtcttttaccttttgtcctcccgagcgaggtagcatgcatccgaattccataaatacggctaggccgcaagctgataatatcgtcccaaccagccatactagcagggtcaatccaatacttccagcggatctgacgatcgagcctggtgttgcgaagataccgctcccaatcacctgcgaaacgactaggatgtatgcgcttgaccagttgatgctctttctgtagtgcgtccctggtagggtatcgggatatagtggggggaaatcatcggttaaaaggtcgagtggttcttgttgagggctgggagatataatgttggattgacttgatgggtttaaaagaggctgtctctcccggatatccatggtgagctgttgcagatggagtacgttgtatagtttgaacaactatttgattatgctgattacacggaggaaatcattctagaccatgaattaattcagcccagaggagagtcgaggagataagatgttttgggtgcttggaaatcatcggattagctggcacgtcattcaggccgactgttgtgtgtatcggattcttgcaggtggtttacgccataggaatgtgatcgcacaactcacattaataattaagaggaggtatgtaactggcctatcatactttggctttgaaatcaatgttaaactatgaccgaatactccagtactttattcgaggtggagataatgacccgtactgggataggactatatatagcagggttattcagagataaccacaaaagatcaaagaggaatattcagcccagtataaagtgtagtcatttaaattccaaacccgaatatatccctactcatagagtccaattatccaaccatcagagtacatatcggctgtttctgaattagtatcagcagaccaacaaacgtgtagatgagaactcacaaagtcaaattctccctgtcagtcaaatccaactgactattatccactacgcgagcgactttaccgccatccgaatcaaccgtctcgacaaccccattgctagcgacctgattaaactccgcgagcttgtcgcgacgcttgttctctcggcttaggtagatccggagcgcgataataattatcgaaggaagaatcgcagcaacctggagagctatcagtcaaatattccgcacatagctttgtccaaacacgacttaccacaagcaaaataatccaagttggtctgtaccgaggcttgaatggttgttagtatgacagtccaagccagctcgaatgaagaactcaccttccattccggccggaataattgcggagagatgatatttcccagtccgtatccaatatgataaagcgcaatgacggtagttttcttcgtatgtcccgcggacgcattggcagcccagatcatcacaacagcatatgggatgccggttgtagatctaatccagattccgacgataagaccccatcgattggaccagggcaaggctgtcggaccaattagtagtggaccacattttgaaaagaagagacctactaacctagcagaaggatacttgaaagagcacctggaatgtatgcaatgagcgatatccatgctcggcaattctgcaagtttcagtccacgttcgcattagatgaccgagtctggcttaccttggtgtgatacaaagtgattgcagctgatatgagagaaaagaacgacaccacacccgtgacggttcctaatagtgttgtttgaagaacggtgaaaccaaatgacttgatgattagtgaatattgattcgtgactccatttgccatttcctgggaccaggcgtgtaggaagaagagccaggttttggggtcttgaattgcttcaataaacctagagctttagttagatattgaatatcaagatttcttaggtatggggtctgactgatatcttttgaaaaccttttgctcgattccggagtggttctctttgatccgtagaatagccttcgcacgttcctcgtgtgttaagaaattggcatggataggactgtcaggaaagaagaaatatacaaagacaccaaaaatgacagtgagaatacccgtaatcactagaatagaggttagcaatctgacggatatactcggggaacaaccatacccatgaaccatttccacggagaaaagctgcccgtatcaatccaaagaacaccataagataacaagcctgacgtgataggacttgcattaccaattgaccacataaccggcatcatgacggcctgctcgccataagtaaagaacatggacattgaaagcaggaatgctggaacgatgcatgcttctgctaccccaaggaaaaagcgaacaacaaaaagagatgcaaagctgttgcaagggatatgcaagagagtgattccacccctatagagccagtcagtgaccgatataccattgtttgaggacaagagaagaacttaccatattatcaaattgccagccagccacttcccaacaggaaaccgctgcaaggcccaattctgcggccattcagccaaaagatacccaaaatagaaaattgaagagagccagttatattgattcgagtttagatgcgcatcttgcatgatccctaggatcgcagaacttccaagctgctagcatgttattactggattctcctattcggggatcaaattaacataccgtttgcttatcgacatacatcaagtgatatccaatgcaaagaaagggtaaaacccgccataagcatttgttgcgaatctgtattgcttcttcgggagtcgggtctgtgacttggattttcgagaatagcttaaaactctcatcggcaaattgatcagggagctttggcgtgttattgaaatcattgtcactttcttcatggacttgtgtttctgccacgaagccaggtttatggtcttctactgccatcgtgtgaggtataaacaacgaagaatatgaacccgcgtaaaaggctcaattaaatgcataatggcagccctgctcatgtacttatgatagtaattagcctatagataaaattgcgcaatgttcctaagctccgtcgtcttcacactaatgagagattcgcaccagataagaggaaggagactgcgggctcaccacagtcttctcctaatctggaaggtcgtgcactatatcttacttggcagaagagtgcttgattaatcaaaacgcgatgttcatctatacaaacgcgagtttgactccaaagcacgtctaaagtcgccattgcggggttgcgtcagcgctgcattgttggcgtgcttaaaagctccgaagtcatggccgcgatagaccggaactataaaatttttttaccagaagtaactttttatcgaactgatccctgccgaatcgacgaatatccaattatatcaatatgacagaaaaaaaggaacctattcgcgtcttgattgccggcgcaggcatcgcaggtctggccacggctatatcgctaacacgcgtatcaaccgttccgaacttggatatccagctatatgaacaggctccagagctcttggaaataggagctagtatcgcactcagtccaaatgtaggtatctcgcgcattctcttgaaatgattaaagcacctaaccgtgatgaaatatcagggcatgcgcacactggagaaactcggcgtacacaatgccctaacagacgaagttgggttcagaggcccgagtggaatcccacaaatattccggtgtggatctatcacatagactcgagttgtactactcagcatgctgattgataaatagccactggaaaacgaaccaagtcgtgtctacagacactcacactaacgtccccgatccccgtcaccatactacccgcttccaccgcggccatgtgcactctgctctgctcgagcatgtccccaaagagtcaatccacttgggaaagaaaattgcgcgcgcagaagccaatcaggatggagtttcgttgtatttcgaggacgggagtagtgcccacggagatatcctcattggggccgatgggattcgatcggtttgtgatatagcttggttagcattgtgctttgctaactcctgttcagagtgtcagacaatcattcatcccagattataaactacggttcagtgggaaggtattcatgagggcgacgttcgatgcctcgttggtagagggcaaggtccctgatttgcctgctgattcgatgcattgggtatgttatcgctacattagggagctttaaaatcgtcgctaacaaactgtcagtggggtcctaaagacaacttctttgcgtctcgtcttggtaagtgaaaaagaaccagcatttcacggctgcatagatctgacaaaaccaggcaaggaccagtacaccaccgtcggtgcatacgatgacccgcgttcggtagaagaggtggagaaaagcattgcgtgggatcaacttggcaatgtggagttcctaagagagcgatacaaggtatgttctcaattgacctatctgagcttcagctgactcacaccctttaggaatggaaccccacggtcaaagctctgaccgagcttacaccatctacaaatctctatcccaatttcgcaggagatgctctcccgtcttgggtctttgggtcgcgagtgactctagtcggagacgcagcccatgctcatggcggttccttcgcagccggaggctcgctggcgttagatgactccctcgcccttggccttgcattcaaggaagtgttctcttcaagaaaggccacgttatcagctggaaatatcaacaaggcattgcggctgtacactcaaaccaggcagccgcatacagctcggttgctgggcattgtgcatagccagatcgacaagaaaagtactatttttgcgacacccgaagaagaggatgctgcgcttgttgctcggatgactagcaggccaaatacggagtggctctcggaacacgatgttgaagctgcattcaacgctgtcgttgagcaggaacgggcgcagcgacaggtacgccttgctagaccagaaaggaagacaggtggagagatccaactccaaggaagcaagttatagaatagagtcgttgattgattcctgatttatttagcacatagaggattgtgtttatgctatgtggttactttttcttgacattttaactggtgagacacccgaaagacatctgttcatcggaatctatgtacctatccgattagcttttgcgacattcggccgaaaagcaagactagggtctggtgtgctatacaacggatagttaggacagatgatctgaattcccgagcaaggcttgtgggccaggatgtgccacgaatatctgttccactatgctttcaccatgtctcgggaatcgatagggtatacgctccataaataatcaattgaggagcctgatgactgaagcaaacgtgtctagtcccagcctcccaggcttactattgtaaaacattgggttggttatccaaggcttgggagaaaaacacaagtggcaatgcgatagtggatggccctagaggcgtaggcagaatgataaaagtgcaagccaatggggcttaggcaaggctagtgataaggaataaccttgtataggagtatacgatgtgaacatcgtacttttccttgttcggttaagtcggatgttccgtcaaaaggggcggagcttctgttgaggtcacggggtgtggctggtgcaggtcaaaggatcaactgaattctgcgtggcgtgtgtggcgcacgcatgagattatggctcggaaggacggaaggctatagtttattctagtagaatccagtcgaatgaagcaaaatatagtagatcgtcacagctctttgatctgaaggagggctggaaccgggaacaggtggatcgccaggaacataaagacgtggtatgtatgccagaggcagtgcaaggacagctgcgcctcacgaaaaaacataccatcttgtattaaatagagacagatccagagtcctttgtctttccagttcaaacaattctgaataatctcgccatccgacagtccattggacattctagaacgtttctctaaaccagttcttatccggtggcaacctcctttatcttctccttatccaacatcctccaacatacccaaaacatacaacctacacacaaaatggctacttcagtttcaatgactaccccatcccactcctcgcggccatccctatccctagatattgccaacatgcccccactctcccagccaacaccaccctccaacaccctcctaatcaccggtctgcacgatctacttgtcttccaacccccagcactggaggaaatccgcaaacaaatcaccgaagtggcacctctgaattccttctccccactcccgtccatgcgccgcatcgtgtgctccttccacaacgaaatcgacgccacggcagtgcgtaaactcctggacggcaaacgcctcctagaccgcaatgtgtacccgcggatctacttcggcgagccgacagcactcctagacggcggccgaccgaaactcctcgaagccccgcaagtctccaagatgttcttcatctcgccaccgcccagcccgccgcacggatgggtcgtgcgcaccgagggcccgcccaacaaggaagtccacgcgacggatctagcacacgcactggcgatgctgaagacagaccatgaccatgcgcagcccgagccggctgcagtcgaccccgcaacgccggtctctatctcctcggacaagcgcacgtccagctggccgcttgctggccatcagcgtagcaggagcagcaccatcatctaccaccccgaggaccatggtgacagtccccatcttccggcggttatggttgaggatatgacgctgggtgctgaggatgaggatgtggatatggatgcgatgagccccattgagatgtcggttaaccagatgccgcctaagacttctcgtccgccgcttgagttgatggagtagtgttttccggggatgctgttcttttgtgttctacattctgcatttttagcgaggcatggttgtttattgtgtatagtcgcatctgtggcatgccaggcgttgggaaaggatgggcatttcagcagcttttccgggatttgcttgacgttattctttattgctttacgaggaccattcttaataagattcttaaataaacattgcatattcatatcttatctttggtagttgtatctgataatctatactaatgttattgttggctcagtttcttggtttgatagtgagctccgacatcgtcaatttgcagtcaaagagtgaccacacactgctccatagatctctgcctagtcctatacaggtgtagaagctaggacaataaagccttgagggcttgttccgaccttgagccggtttgaagtcctgtatctaccaagaaacaagagcatgtagattttcgtgattggttagtagtctagggcattgactgaggtttattgttgattcccgcatgatgccataacttataggaagatatttcatagtttagcaagttccatgatattcagtattttcaggttcactgaaccatcgagtagatatttgagatacagagaccagtcattctctatcatcagaagactgtccccacagcaaaagatacaaagaatggaaaactccagagtgcgcccccattcaccaggaaatcaaaactccattgcgcatgctcaggctttatttttatttgctgggttatgcacgttcagaacccatagctgctctgtccgtaaggcgtagcaccatacggtgtctgtgcactagcgccccaagcactagccgcaccgtttccgtaggcagtcatgtttccgtcaatgccctcaggtggctcgtaagcatcggggtcattggcacccatcatctcagcatcgtcagcacctccgccatgtccatcctcaccttcacccaagagcacggagacggtggttgcgagcttgcgctggagcgccacaataccctgctggataatcatatctggctcaaggttgccaatgctctccacgtcgaaatagaagcaattaggctcagcatcgtagtcaaagggctggtcggggttggcagcgggttcccaggcagcgttttcagagataggcctatcaagagtcggtatgttagcagatagatcgaagaaaactcgtgaataccagctcaacgcctagatacgtaccattccttcaccggatcctgctcataccagtagtccacatggcgcaggttgttgttggggtcatattcaaagccgacagcagcagtgggcgcccacttcgcatgctccttagcggttcccttctttgctagacaagtcatcttaatctcctgccctttgcgcagcttgcagatcaaggaacccttgttctcggggtcagtggttacaggatcgccgatcttgtcgttgatccgctcgccgacgacaactaaatcccgcgcgtagacagacatgatgccactgctgcagcgcgcatgcagagatagtgtcacgctgcagcgcacacagtggtcttcgcagtcgcagtctcgcgtgtagtcgagatcttggtcgcagttgtacgagttcaaggggatcatgccgaggcggtgggcgaggaactcatcagggaggaccgaggtattgctttcgatttcgatgatgtcgagtgccaaagtgggcacttcggcgaggataactcgtcggagggagttggcgaatgagaggtcgactgcggtcagtctgaaatcgacgcggtaaggttccgcctgtggaatttgtgagtcttatgtcctgctgctctgtggatgtctcagcttacctcgcggactgttacttggggccctgtgggctcgagatccatttcgtaatccatgttggtatgtatgcggcagcgctgctcgctgccacccttgtctggagctgaagatgtttatctgcggggcgtaaaagaaagacggtaggttgaagagtgcggagtgcagtggcgaatgacagggtaatgagaattgttgtggtagatgaattgggcgcgaagttggcttgagggcacgcgggtttgctccctcggagacagctttttgcgctttgcctaatcgggtcacagcctctgaaagtgccaatatcgagtcattcttttttacatttacagccataataaaatgctttcacttattttctatttattctacggttctcttcttcgtattcagattagagagtggaggaagtatttcagattcgattcagttgctgggtataaacactgaatccatccaaaagactggtatctagaactaaaagaagtgtgcgctcgattcaaatctggcaattgaagccgtgcaattgattcaggataaagtaatccgatatcacagttgataagctaaggtatcctccagtatcaatgcaagaacgtcccaaagccttcaagtctgcttgcgaaagacgtctatcagaaggagacaaagcaaagcaacacaggctcagatgttcattcgcaaatgaaacagcagacgggtagcggcagcccgtcgaagatgcaaaaaaaggtaaaggtagacaaagccaatagtagaagcgacgaagccaccgttttttggagttcatgtcgagtcattatcagggagcagctctctcgggatagcagtgcacatagaggtagaaaaaaagagggagggggggtgtttgatctgcaagagaaccgaatgtgcacgcgatcgaggctaccgctttaaagagctgcgatgcaaggcttcaagcaactcgggccgatttgcaagggcagtggcagcctgtgtatacgaaacccactgccgtttccgcttgtgcatctcgggccattcggtttcctcctgctggacggtgacttcgaagaactgatatgaggctttgggcgcgtgcgccgtgagaaggccggagggtctcatgtccggaatgagtcccagatctctggtcacgacacagatgacacccgcttcctcccaggcctcacggcatgcagcctgctcggcagttttctcatcgagctcccaaccgcccttggggagcacccagcctccgggtcctgcggattgaatcatgaggactttggtcttgtcggcggaaatagggacaacgccggctaccagtcgctcgccttttgagccgtagcctatgccaagccgttagagtcaggaaacacggggacagtgtagacgtaaggggtacgggtgcccccccacgtgcgcagccgcaaagcgacaccagcgataactcacgttggtttttccgcccaacgcgggcttccatagaccgtatttgagccattgtaatagacaatcgaatatctttggaattactccaggatttggtgaggggtggaaagtcggggaaaggaagaaagggagaaaaagagtggaaaggccaaggatatcgaaaagatcaaggaaaacccgatggatgatgctctcggaagctccctcggagcctgtcaggtctctgaggtgagggaggaagctccaggtgtctagggtggtgtcaagggacgggagtacagcgcgagggcggtcgggggaaatttttttttttctctttctggatattgcggaggtaggcaatggagatcaggtcttcccgttcatgcctgacgggggattggaatggtaagtggaaataggcatggttttcaaaagaagaactgagaaatgggaggttattgaggaatggagaaacgaagagaagtgggaatggaggggcacggcggcgcccgggagaagagtcgaggtacgtttcgattttttcctttgttttttgtgtcttttttttatttttttgtgctcttgtttgactatctcaacttgtctttgttatattgtgcactatagtgactctagccacaacagagagcgcgtaacctgttcaatggccttgactttactctgtttcactctatatatggtcatgtgacactccagatggaagaagtaactgggatgtttctatatttgctagaatctgctgtattttgctatatttgccacaatccgctctgacctactgtaatgtacgcttactattccaatcatccaatctcataaccctgtgtgcgtcgggtaatgagcctcttacaacgggatttggtaccgagatgggagaatttcgggagtttcgaccagaaactataagatcggccgtgtggctggagcgatgagatgcatagacagacctaactaggtcgacccaactagacctaaaaaaactacataagcacgcataaacgtagtcaggtcccccttgccgtatagtccgcatttacaacattaacccccgccggcttctccgacttcatctcttccgatactacaactcacgtccactcgccagtgcacgccaacggacatccaatctaaacatgcaacgggttgacgccgaacgcgcgcgagaactgtcgctattccgcccactaggtacgtcccactctcctgcagggaaccactgagataggcctctgttaccccgtggtagttccactggcccagagcgctaccgctgaggggaatttggcggggatggcaacgccaatgcatgcagctctttgatcgtccatttcgatgcagaaactaatgtgatgtgctctcaggttaccaaaagaactcgtgtggctactgcaagtccaaagatggaagttggttgcccctgactgctttgttggcccatttttcttctttcaggtctagaatggctatgctgactagtaaaaggtgcatcgtactacgccagttccacgtccgtactcccggaacattatcaagagctaatcaatggtggctggcgacggtatgaaccccggttcaatttccctgtagcccatcagaccatactgacatatttagatcgggaaacctctactataaacaaaacctgcttcggtcttgttgtcctcactacaccctgagattagaggcatctgcttatcagccccgccgggatcagcgcaaggccattaacaaatggaacaaattcattctaggtcccgagtatatgcgaaaggcatcccggctttgtccgcaaacccgcgagtaagcaatcctatattaccaatcttgctatcagatgactgctaaccaacgcatagagagaaaaagcaccgcaagtgccactttgaccttctgcccgctgtccaccagagcgagtacgaccacgtcaaacggccaattgaccctgctaccaagcttcccattgaaccagcgcaccgctttgaagtcaccattgaaggtgactctgtgtctcaggcgaagtttgagctgttcctcaagtatcaaacagctatccataaagaggatgtctcccactggaaacccaaggactttcaacgcttcttatgcacaggtatcaagcgaactccgaatcccctaaccgccaccaatgcttccgagaagaaactcggttcatggcatcaatgctatcgtcttgatggcgagctcattgctgttgcagtattggacttggtccccagcggcgtgagctccgtctatgtcttgtaagataatggctgactacacccgaagacacctaaatgtgataagctgatgttcggttccacacagctacgatcccgcctatgagcaatgggaaatcggcaagctgagcgctatgcgtgaaattgccttctcgatcgagaatcagtatatgtactactacatgggtaggtcgcagtcgtggaactggtccttattcgtgcatctctgacaatcgacatatagggtactacattcataactgccagaagatgcgttacaaggccaatttccgcccccagtacatccttggtaggttcgactcgtgtctagtcttggtacatacttttgtactacgtgaaaatcatgcacaacattaacccttttctatttctcagaccctgaatcctccgactgggacccgcttgatggcgaattgatggagaagcttaattcccgttcctatgtctctttgtctcgagaccgaacatcctcgcctgcgcctctggtcccggaaagtgatgccgatctagaggaggtttccctcttcgatctcggtatgcctggtgttcttactatcccccaagtggaagcactggacctggatcattggctgctgttctttgacaacaattttgttcacatgaaggtatgcatgtattctatgattttcggtcctagggatgtctttactaaatcaaaataggatctggtcaaatgggaaacgatgtcaatcacttcgccaatgtccatcaagggaatcgtggccgagttggccgcagtcctgggctcgaaggttgtccgaaacagcgcagtagacttgctcggttgatcaaagacggcgatttgagcctaggtttactatcaccgagaccgactggggttccaaacacccgcaacgaatatggaacagatatagagtaattgtgtcgaataattgattcacatgcaattcagtcaaatccgccaaatcgaggcagtctctgattatcttaattctagatccaaatgacaattcttagcaagcaacctggtaagtctataaagttccttgaatcaatgaaatgctagaagctcgacttctactagtcctgaaggatatgtgacgtgtacgccccaaattcaatgtcatagatcgcgctttccttccacgcgtatctacgtgcctacctaactaggaaaccatgcccacgtgattcattgtttaactctctcaactctcctcactcttctgacttttctcaccatcctaatactcataccctttcacgcgggcctttggcacctagtcatctcgaatccctcgatcgttcttccttatctacgctggcccttaaaggggaggtgctcagccaggtttgatttcacggagcatacgatccgcatgaaagagatgagatttgggttcctagtaagaggcaccttcctggcattgaaactctctactaactctttaagtaccgatttctaattggataggatcaagacatgtccatctatcgaacagccgttgaaaccccttattaaggttgtcgcggtacgaatcgaagggagttgcatttggggaatactttcaggactcaagttggccctccctccaccaagccctcgcgtttctatgggggtttcttcttttatatgtgggccttctggtggaatggaggattggttatctgggccagcgattgatcgaccggtatttacattgaattctgtgaagtcggatatttatagaaatagtcatgttattcattattatctcggaggcaattttggtggtggatcacatcaacgaaaccacgtctttctttttccaactagaccgaataccctctggtctccttgatgcttgccgtttaaaaaaataattatgtagctgagtcgtgcccaggtggtatcaactttgtttgctgtcttagtaccatctaagactccctccctttgtctacttcccaacacgttcacgcacctgcacggtttctatcctaagtctatcatatttgatacatacagagggggtcaattgctatgtcacgcggaacggaatagaatggaatgctatgctaaactatatttatggccagaatattgtctttctcttcgttggatgctcatcctctatttatatcaataaggagacaggaattgacctattgctcctactccttggggtataagagtaagtaaggacactcgtttatcatcagcggttactaatatagtacaggatatttcaactcggcgtgagagagtgtatgtggcacctaccgaggttttcgcataccatggggcatgcactcactatgcctttcgagaagacataaatttggccgagcaatatcagcctgacaaaacgatgaagcaaatacagataatccacggtatacaattcataagtggaaggaagcattatcccgatggctcctttgcctccatctctcaacaggacgcccaccaggatggactgggcaaattccatgctcttgtgattctagaattccgatcatgttgttcatgaatcgttgtggcagatgaggccggaaatcatcatacctccgaaaattgtgacgtccactgtgacccgagcgagagaatttcagtgtttttgatatatacaacaaccttgccctcatcagacagggcttccatataggttatcgagctcaaagtgccttgggtggatggacatagaatcgcaagctttatgcaagtccaatcttctaaccatggatctcacttgcgaatgttgttggccaaatctctggaatttataatggattttcaatgcatgtacggtttcctatccatctacaagcaaaccatatccctgagacaacgttatattgctcgccagatccaatcgagcctagcctcatggctcaaggtgatataagatcacctcgaatgtctgattggatgttctcttcaaatgttctttttctgtatattcctttcttctcgatgttatagctagaaaggtgatccttagctatggaaggcagaaatgcgaggctcatcaatcactctacaacaatctaaggcaacagagaacataaaccttgtagaagacatttctatgtataaccaaaaacttatataaagttacacaaggacgatgactatgaacagtaagaaagttcattcatacacccaaaaaagaatcccataactagacagcgccatgtagtaaaatcaagccagctggcgccacatgtttctatccgtttgcctcgcaatcctgcatattcgccacgaagtccaaagaacaaaagaaaaaaataagcagtcattcaaaaaggcacagcaggtaagccaccatattcccacgaaaagcccgcagccgcggatgccccctgccagatatgccctagaacgccagagcggagagacaaaagaacccaaccaagaacaggatgctatgccaaaaggatacatgaggccaaaagaaagaaaagacaataaacaagatcaggaccctcaacccttcactcatcatcatccctcccctctaacccatcaatcatagcccgacttggcttcctcccagccccatagaccagctccataagcttcgccttctgcctttcccggacagtccgtaggtagtcatatgtcccctccaacccacggatctgcccatcaataacagcctcaacaggcccaagcatgcggcccggagaaccagaatgcccattcccgttccccccatcaacggacccaacaaagctaacagagtcattccgacggacgagcgggctaaccagcttcctgcgcagcgtctctagattgaccttcagcgtgagcagtcggccgcggtggtcaacgaggaggtgtttattggcgacagtgcggctgcggacattcgcgagcaatttcttgttcttctcgtatttacggaccgccgcggcatcgggccctagcacgcgagtccacagggaagaaagcatctcgccctccgcgcgttcctgggcgtcggattcacggacgactgtgcgctgcaggttgaggaactggcggtcgatggactcgaaaagcgcgaagagcgcggttgagtgggtgagctcgctgtttattgattcttctagcacagcgaggaactccgtgaaggtgcgggttagggttgtgcgtgtgcgctgcgcggaggttggcccaaagacggccattacgaggtggccgaggggcgtcgttgttgttgaggttgcggggacgccgttatcggagatttgagctgaccgttccagtgcgccaaggcgcgaaagcatgttgtgcatgttgtcgaagacgattgtggggagggtgcttggaggctgggcggagagggtttcgagctcgcgcttggcccagtccattactatgaggatggagtcgatgtccgagtcgacgtttgcgaagaagcgggttagctcgagagagagggactttagggagtcggagagctcgtccagttggcgcacgattataggtgcgctggtcatgtttgtgccacggacagactcgctcaagtcccagactgcgacaccggtttcttgtagtgtgccgatttgctgaacgccgttctctgagtagtatatcagtggttcgaaggagcgtgcgaagccggatagctttactaaatcggggatcgattgcgggaggcctggcaggaccagggcgcgcatgaacgcgactgagatgagaaggattaaaatagataaggtggtgttagacttggagctggtcatgcgctcgaactttgagcgtaggtagccatacatcgcggcaatgggttctcggtgctggacttctgcacgcactgcaaagcgaatgtctttattcattcacaacaatcgttagtatacccgcgcctgcaactgaaaccagatcagacagggcctacagttgctcagattctccgcgccaaagcccaccccatcgtcctcgggactgcgccgggatgcgcgccctgaattcggggccggaggcggacttggggatcttccttggagggggctatctgcgcccgccggtagaggcacattagccgcgacagagacgtcgcctggggtggcgcgatcgcccggtctactcttcgcggggccctcgagcgcatcctcatactgtggacttggctcgcgcgactgggaaggggaaacactaagtccgactgtgggcttgagctgcaagcaatccgcaatgaggttatctttgcgcagatagggctggtggcgataccatccactgccttggacatattcgggtggatggaagccagggggtgaccatcgttcctgcgtggggtcctcgatctctccatcgtctccgtctgagtcttcagaccggaatccggagtgttgggatggcagggcgaacattggggacctttggggattggtattgttttcaaagtcttcgagcgacgcgtccagggatggatggtcgtcgaagacgttgtctaactcgtctagcatcccggacggcgtatcgcgatagtcgcgcctcagaagaaaaggcactgcagttctcagcgacgaagcgcagatcaatgcctatgagtggcgatcagttgcggttgaagcacttggacttccttaggtaaacctgagtggttagtatatgcgctgggacagtgtctcctgcgctagccgttacagaagatatctgagcgatgaaccccactgcaaagacgcgataaggtatgatgcgatgcgatgcgacaaggcaggtaatgaattctagatagcgacaccggatatctccgcgataggcacattcgatagttggtgttggactaagatgcgatcaggtaacgcgctggagattaatatggaactgggatcgaaacgcctccttgagcaatgcaggaatcaggaatgagaagacgagaaagcatgcgtcccctcacttgtatccaggtcgaagaggctgggccaatcagcctaccccctgctggtcatgtgctgagactcgacggtttatacacatcagataccgggagaggcacaggggtggtacgagtccagtacttcgagtttatgttgtctaaacagtgagcaccaaggtactcgtcaagtactcttcaagtatatccgtgcctgaccgcccatgtttgcccaatcgatacgaccagggcccccagccaatcagaagtcaggcctccatgatcatccgaagaatctcaaacactagggatagacttgcataaccccgtttgcagtatggagtacgtttgttctattaacagaatatcaaaacgaagtggagcagagaagcagaggagcagaggagaagagaagatcaaatctattttgactcatggaaattgtaataaaaatacaagcccggtcccttgggaggcccgggaatcagcccatggcgccataatcccagacttctatggggagaaacagaaaaaaagccggggaataaaaaagaacatcaggtcgtttatgcggtgttatccttgagccagctatggggttgtcagtggggttcaggggagtgtggatattcgcgggtgacgtacgtgatgagatcgttgcgctccttggtcttcttgagaccaccgaaggccatcttggtaccggggatgaacttcttggggttctcgaggtaggagaactaagaggtattgttagtcgccgatcggagcggaattgaacgtggcagttggcacttaccagagagttctcgttccactcaacaccggcctgcttgttggcgtcggtgtaggcgtaaccctcggcttgaccactgtgacggccgaaaagaccgtggaggttggggccgaccttgtgggcaccgccggcctcggtggtgtggcactgggcgcaacgggtctgaaaaaaaaatatccgttaggtttcctcttcacttgtctgcgcgtgaagcaataatgaacatacctggaagagcttggcacccttggcggcgtcacctggagcgaagttgagattagcgattttgtcggcttccttcttggcttcttcgacgagagtggccttggcacgctctgcctcgcgcatgtcgatgatcgtcaaggtgcagaacacatcgaaggtagtcatgttgaatatttccaagcgtggtatttgcgaaaggtggtagcgatcgcaattgaggtaattaggttgacgagggagttgcaatgtgaggaaaggtgaggaagtgttgttcaagcaccatctcaggttaacaaagcgcgttgccaattgagatacccttcacttccttccctgaacctccatggcgcctccccgacctcctttcagctcaatggggcaaagtagatagcttaccaggggcgaaagattcttgcttcttaggagccattgtgaagtattatgaaagaataaaaagagaagttattatgacactgtactgtacagaaaaaactaagaaggggagagaagaaaatctggttatttgtacttgggccccgacgcttcctctcgtaatccgccattccgccaatcagaggggagatgattcaggcggacgggcgcaaccggaaacttcggtgtggctgttgtggctctgacatctttcactcccttgtttgtgctttctcactgagacttggaggttcaatgcttgggacagctggcggtttgtctgtggcaacaaaccgacttgtatcctctatcttctatgtcccgcccctatgatctcatacttcatcatcagttagctccgatacgcttgtgtatatgcaaagcttcagttggctcggaaacagcagctctttcaccaatttttcactctacagagcacccagacgcccatggcaatggtggcccacatctacgcatattcacccttcactccttctgctggagaactggagcaacttgcccgatccaccgcagcttcgaaatggcatgattctcattcgcccgagagctggccggtggtccggcgtgtggatcctgaggcagaaacggttcattctcgatgcattctcggccgtgaatgcaatttaacctgttgccgaggccgcggtaagcttcaataaccttgcaaggttcattaggttggtttatgtaatctgtagtagtctcagtcacgactctgtcgtacaactttcccaaacccatgcaattgtgggaaacacgggaagtaatggatactaagccacgcgaatatttcgaaggtcaagtggtctcatcaaaatttgcattccccgaaatttccattccccgaaatagtcagaatatgcggtcagaggtcagaacatctcgactcaatcggcatccgatatcccgatacagtcacgtgatataaaaccttctccaaaaattgcatctacggttccgcatctagataagtcaacaagatcatccaaccccctccacaggagcaaaagggcaagaaaaaaaataccaaaaatgccaaccccaatccccggctttctcctccctcgaggcccaccctcagcaatgaccctgcgcatcctccaacgccaaaacacccgacgcagcttcacctcgaccggcgccgcgttaaagaaagtcagcaagagcaacaccaatgccaattctaattccaaagctagcggcacttctaagccccgcgttctcgcaaagcccgacagattccgcccgccctcgcacccccagcgcctgacgactccatctccgaagaacgcacccccaggccaaccattcgagtatggcccgcggataacggagaaagagcgcatacagcagagcaagacgcagtacccgggcatgttcccgccggagggaacagtgatgtttaagttcctaacgagcaagtggatccacatttggattgcaatggtgagtttccgacaccaagctccgggtctaccaaaagcaaagcttccaggagaactcggtagatcaatcaactaatcaactacacagagcgtcctgatctcctgcgccgggttcaccttcacaactaatttcaaagcaacctcgccgttcgcgcacctgctaccatcctggtcgagtctgctgacgtcgcctttcagcacgatctcgcaggcttttgctgtgtggcgcatgcatgtgcagcacaactcgatgcgcgtgcgggagcagcgacaccgtcgcgttgaggatgcggagaagaggaaggagtatcgtgttgcgcatgggcttgagaaggcggagcctgagaagaaggatgagggtgttgaggtggattcgcagtcgcctgttgctgctggtgctgctggtgaaggtgcggaggctgcgaaggagtttgttgattgggaggggaataagaggcccgttaagaagtggttggggatttggtgattcttatttcctccacgccttggggtgggctatttcagtcatatctacgggtagtatagctatctaggtatggcatatgctgtgtagggtttggctgtgggtatgtatcgatgcagtcatacatgagggagcttcagacacccttccagcagcgacgttggtgtagatggacgttcaatccattttgtacattagtggactttcagtctacgataggaaggccatctcaacttcaatcgatctaacgataaagagaaacgatttaaccaaaaaacaacgcttttctccaaactccagaagtagcgacctatcaaatcaggtatcaaaagtcgcaaccttaaagtaatgctgtactttagtactcatacatgaaatggttcaaaataagacaatcattgcaccacaaccccctcaagtccctcaagaacctcctccccaacaccgcccttaccgaggacattcttaatcatacgtgcaataacattgcgcttgacaccaccccttcgcggacgccagacaccctcaacctcctcctgaccgccagactcctcgccaggccccgcagtagcaccaagcatattcacattctcggaattgggaatacccggctgagtgaggcgggaggggggatcgatcgagcggatcgatagcagtttcagagtctcggagtcactgctgcgcgtaacagagatagccaggacggcgtctgcaacggcgatttcttcgcggttaggatcgaagatgacgttttcaccgacagaaataactagcagcgttacaggtgggcggacagggtatgatggtgcggcggagagaggagattttgaagtattggagcgcgggtagagatactccgcggcggcccagtcgtcgtcgaagaaaggatcttcttcacccgtggacttgagtttcggtagcttagtgctgaggagggcgaggtgggttgtgagcgataggagggggagagggtatgcgagaggttgagagagtagcagaacctagggtatgacatgtcagcagtgatcaagtcatacttttagaaccccagaataaccataaaccgagagacagaaagcgattgtcaaaacttacatcaatatacaagcgccaatgccaccgcttgttaataacaagcctccccttcaacccaccggccatctccttcgaatccccgctcccaccagaaacagaaccaactagactctctcgcatcatctcactcaaaaacacaggcagggcatcatcgtctctaaacccggggatctcaatcgacatctgcacccactctccctgtcccgagacagcggcggagccctcctcgccctcgcggttcagtgcgtcgccatgctgcgccagactgcgcgagtcgagcgtgtcggctgcaataacggtcttctcgacttctgctttcacgccgacgatcgcttgcgtgccgtctgcgaatccgatgcgcgcgctaccgttcgcgccaggcaggatggtcgtctcggcagacagaggacggaattgtgtgggtgagcgaccgtctggtcggattgggttcttggggaggctgagggaggtgtaaaggtaggagagttcggcgggtgagaggtggggcacctgagaggcggaggaggcttgtctttgatttgacattttggcggttgtagtgttggtgttgcaggcgaagcgaaatagactgctgtatcttggaggatagagctggagttcggttgcgcgaggttaagctcgtagctgttggcgggcggttgattttgtggtgatcggcctgcgatttatgaaaagtgcttgccgggcgtgctggatgtgctaaggtgttggtaacccggattccaagctatggccagtatagtttcagctggcgaggttgaacgggggagcaattgaggaagaaaaaaaaaaactaggtagagtcgagcaagcagtctcaatcaggaaatcttgatgggcaacggatgatcgttgttccgttgatattgatccatgtaactagatgctgtgatttttctacattgactactccgaatttcgtgacagaatgaccatcttctactgtgtaatctaatgtgcatgaattgagcccagtattttagcccaaaaatcccaccttcccacgctgttcatcattttcatcgccactcctcatgccaactgattgataggaattctaataagcgttacagaaaacagcaggtataatgtctcaaaataaagtctcgagtatgtagattcaatgcgtatgtagtaagatatgtatgggcatggcacaacggccaaagggggaggtatattacaaatatagaacggactggacccaagccagcacgccgtgggaaaataaaatgatacaagaattgaagcaggagggagagctatgacaggaatatgtaaatggaggggataaataagtgatagaaaatgatggacaagaagtaaagatggggatggctgtagccagaaaatatacaagcggggagaagagggggaaattatatggacaaaggagagagagcgcaatattcatcgagaatgatttgcaaatgtgcagatccgatatacatatcggatgaagagagagggtgaggaatacctaataaggtaggaggaaatgcggtatatgatgcgacttgcgcatgtggtatcaaacgtcaaggaaagaacccacgcccctgctaaatgatgaaacgaaaggactccatgaaaaggaaaaaatcaaacggcccaaatccatctataaaagggctgcaggggtatgaatgtagagaaatgagaaacttgcccaatgcccatatgtgaaaaaaaaaagataaaacaccctccgaaatggccagaccttgcaaaggaaatataaaacccaaaatgcgccttgagctatgtagcttgctcagtgtttgttctgttttgtaattttgccaaatttttgtgctcttcgcaactgaaaaggctgtgctgttgttcaaatatagttggatccaggagcgaagtagtcggatttattgttgtgatactcggcctcctcgtaagggggagtgggccagtggcggcttgcggccatgggatcaatcttgtggatgttcaacttgctaggtgtcgactgttgaccaaatgcagcagtttccttggccgtgggtgacggtgtaggataagggttctgctgtgcacgcgagttgtctggttgccggcgagcagcactgtgcgagtcggcagccattgactgagtctgggccaggcgtctagccgccttgctggcggagtgcaacacctcatcaagcagctcatcttcctcttcaggagtctcgtaccgatgaaccgggtgagtggacatctgcatggcacggcgagtcctgctagagataggagcagggttgttgctggtgacgtgaggcattgactggcgcttggtttggccgtcggcagaattgttcaagtgcactgggacgttgctcagtgtggacgagtccaatgagtacttgacacactgaagagccttgtccagctcgttcaagtcggagccttgctttggatcactagtaggcccatccagagccactgatgaacggttcgaccaagggatgcaacctgcgttagcctcgacgtcatcattaggcgctgattggtttcgtccagacaatctgcgggcgcgtttgcgcagatgcgagaagaaactctcctttgtggttggtgtgctagtcccggaaccattgagcctcctttcggcctctagacgattctggtcgtagtgattcccatgggagttgagggacaattgacggccgatctttgagctagctgatgtactggaggacttggaagactgactgtgcgccaaagtggcgttcgcctgagctgtaacggagttggagagaggggagacagggcggatagaaggaaggattggcatcggtgcaccgtttgcccaggtagctcgcttgatgttcggcgggcgcgccttgacaggctggatctcaggtacggtgacctgagtaacagccgatggccgggcagggctttcttctgcagaaggtacagggctgtctgaccgaacgaccaatgatctccggaaccacgaaggcttagaagacaatgtaggagagtcacctggggtaagatttggtgacctgaagctcttctcggactgcttgcggcccagtagtctcgatgaggtggaggacttcggccgcaccggatcaaccgcatcggcgaagtactcgtggttaagcgcttgggtagacgttgggcggttcttaggatcccacatgagacaccacgtgacgaactcgctaaatgccgcaggccacattgggggctgaagcacggattccatcgggtgtggtgccatcttggggaatgtgaaaccgagcttgtgagccaggcgtgatccttcacgccactcaccaccgccaatcttagcgcccgacttgctgtaccagtttcccgggctacccatgatctcacacacacgccaaacttgatcgacctcgttacctcccgggaatagaggctttaacgtagcaatctcgactgccatggcgcccattgcccacatatcgactggtgccgaatactctcctgctcgtagaagcacctcaggtgcgcggtaccagcgtgtggagacgtatgtggtgtatggttgtttggagtgagtctcacgagcaagaccaaagtcggcgatcttcaccgtgtagacaggaggggtggagggaggggttacgaggttagagtagcggctgaaagcggaatcattgggggcggaggttgagacgagaatgttctcgggcttgatatcgcggtggaagaagtggtgtgcgtggatgtggtccagaccggacaagatctggtaaaggatgctcttgacgtgcttgccttcaaagtatttatggtcacgagccttcatcaactgatataagttgccatccatgtattccatgcagatgtgaagcttgtgagagtgggggtcgaggaagatgtcgagggcagggacgaggtgggggtgaatgggtaatgttcggaggaagatgacctctcgcaggtctagacatggacccaaggagtcaaatgtcttcttcattgttttgattgcgacctaaccaatgagtcagtgaagcccaatacaccaccaatcttgctattccataccatagtgcctctgcgagcgatatgggccccggcggtccgtacgcgcgcgactgccacgctaccgaagcttccatcaccaatctccttgatgacttcgaagcggtcctcgaggcttgccatggaggtatgtgacccccgggtgggcatatcgtatgtgacggtcatgttgatgttgtctcttcaggtctgccagcagatcgggagaagaggaatgcggaggaggggttctagaggggtgttcaggtcagcttcccgacatgcttgcaaggatccggcgttcttacaattatgtagaggggaaagtttcgtcgtatccccgagtgaatgtgtatgtatgtatatggatatcaattgcagcaaatgatcatgttctgagaatcagttcgagccggacggttgggtttccattgacggaaaagtaaggagtgacaaggtaattggagggggagtgacggtggtcatgtagtgggcgatctggaaggactgaggaccgggcacgatgcaataaaaaggaaaatccagaataggaggagacccgttcctggtggaaactggagggatcgaaggaccgagggtgagcccctgacgcggtgacagctcgagctcctagacggggccgtggagacggtaaattaacgactctaggtcgttgcagatcagtccaccgtggcgaaaacgggatttgaatacggaatctcttggactggagtataagatgagagcgtagagactagaacatccgactatccgaggaatgaaaataaagagatgaagaagtaggagaataaaagaggcattgtacacatccaggcgcatatagagggaataatcaatatcctcaatacggaattacgaataccgcagtaccgaaagtataaaagaaaaagaaaaaatcgatgaattaccaaaataaaccaaacagaaaaatcagaaaaatcgggaaattcccaagaaaaaacccaggaaaacagctaaaaccccaaataaccggttgatcccgtctcaaccaatgggacgctctttgtggaaccgggtaccttatttcaattttaccgtacgcaagctcaaacatgaacatggacactttgggaaaaagaaaagaaagagatgagaagtatcaattaatgattatattcaattatcgttgtcatatttacatacgttgtagtcgaggtccatgttgtgttgtatacaaactctatatgcctataacatctacgttgttcgatttatcatctgaccgctgtgaacgcacggcgcctaataattgaggaggttgggcataaataattgtgtgcagcctgtaaccgttgcccacgctctagatggtctgcactgtttgggatatgtcagcagttgggccgcgttggtaatttatttgactcgaacattagaattggccgccttgaaatatcacaaggctaaatactctaatatctccagatacaaagacatctgatcttgactttgatacaaaagtactatatacacactgatcacctcggttaccccgtctttgtacaagtcatttctagcggagatcttaggctctcggttgatgtaccagatgtacgatgtagatgcacgatgtaagatgtacaggcacaactcgcagattgggagagaaaagcaaggagaatctcttctctcctcgtctcatgttccgttatgtcatgtcctaccttcggacttatactctctgctagtcgcattctcgcacggatagtcgaacaccggtcttgttattcgccttcttacagatcatccctgtcttaatgcctcacctacaagagtacggagtaattcgtgctgacttctttgacgttgattgacggacatccaaccacctgatgtccgatctcctgatgtatcggaacactggagagagatatatggctatctcttttccgactgatccttcgacgggtagggccaatcacatactggggtaagatgctgccatgtggaagataattagtaaattaggttcgcgggtggacggaaaggttcgcggcatagaaaagcaggtcgacttaagccgcgatgagctaagagtcgcatatgatgggttcttttttctctttgtccaaaggtacacggtctgggccctggatgcctgggggatcattgacgggtttctccaagccgtctccgattgggacgtaggatttgcttgttgattcgggttctttgttgaaatcccgtctcgaagactcggatggtagtgtctctgttgccatggatgccggatccgtgttgacgtattacaaaattttagggtctaggacatcgtacctgtatatgtatggtctgaaaaaactccaatcaagttgtgacatgaaaatcagagaccaagcccattatagccactttgccggatgtctctaaccgcgtcactccggcttctccactgacttcaaagctaagggatgtttgtggtcacgataacaccgactttttgactctctcccacagtggagtacagagtacagagtatggagtgaacagatgtaattacctgcagaaagcgggatggaatgcacctgctgaaccctggggcgaccgttgtggccaaggatcccaattttatttggactcaggcggagttgaattggaagagcacttgacctctatttcaacgcatcaattggggtccactgtgtcaatgttcggtgtttgccccctaatccgatcgctgcatgggatttcaggaacaaaccttgggaagtacataaagtacacaaggaacacatctccaagggccgtaccgaaacgaaaccaaggttcgaagagagtgggccacttcacttttcgctttttcatattttttttctcttgaccgcacaatttgattactaggacaacaagctgcgacgtggagtacacaccgtgtacaatatacgatatgaattgtacacggaataccgacattcacagcacatgttccactctctcccactttctcccaccttcgagtctatgattcgctcagtggcgctttcaactccacgcgcaccaaccataaaccaatcactacggaccaaagatcagtagtccgatggagtatatacgccaacaatgccattggtcccagcagcaaagacagcccacttgatccatctatcgtacctatgacgacgccttcttatccctcacaattgcctagtcacgcactgttgattcggggaactgcggaatgctccaccgtgggccttcatctacggagtaggccagtcccaactacccgcggagaccgcgatagggggaaggatcagtgtcgccacctgggaaagcaaactagcatttgcttcccaatctgccgggaggcgccgtggtgttcttttggccttcgagaaggcagttcctgggaccgatatccggatttattgcgcaacggtctccgaatggttatcttgcctcaaaatggggtgattattacttagacctgggacttttaatgcggaagcttgtcgggagcaaatccgcagccaatctctggcctcgttgcccccctaacagccaacccccccttatctagggactaggtaaacaaactggccaacgaacacacgatcaaacggatatgcgtcccgaacttcccagggaactgcatagcgaccgttgggaagttaccaatttcgaggattagcacactaccgtcgacactaaacctcctcggcccacttcaaacgccgaaagtctgtgttggatttccagaatccgtggaagccgcgggagggacacaccccttgatcgctggaactgtcagatcggagtccagtagattatccgtcccagctgcacacgagggcactaaattagcttgaattggccctcggtgctgcgtagctgagttgttttcattaaagtggacccactgtcactccagtaaccttagatttatatgaagcttttgcgcattgggaaggtgtggacaacatacatgatacagcatacaccgacagacagcgcggagactttcacccagccaactcgcactagccctcaatggtacctatcgtctccgtgcacagtggcagtgccacttactgcatgtcattcattcattttcttcgcattcaaatctgattctcggtatatttagatcgcccagctaagccgtgatgtcttgcgccgcagtaatctatctaattgcgaagtgatagatgcccctcctcagttccttaccatgtcgtgctgcccaaaatgggtctttatgtgtgtcatacctgactagcttatttcatttctctggggactaatgtgcgtggtccggctggctttgaaactactccgtagcccctatattaagttgtatgtaaaggcaatcaattatgctcctttgggggccttgctccgcttcttctatggttttctagaaatcaaatagtctgctctcagctgcacgtcggtgccttaagtgagctgagaatgctgtttatagttagtactccattttgaggcgtcgtaagaggtttcttattgctctgctaagttaataatgtctataccccgtaagatggccaattatgccatatgtttgtttttaaaaatcaataccacaatctttgaagagcaaatctcttatgcggccttggtactccatactctgtggtgtttttagatctatcccgccctctccccacgccccctttaatggtataagaattggtcgcaaattataaatagtgtaaatagtgtaactaaaaagcggtgccttagatggcagtgagaacactgtctgattcaatgtcactcctttttaaacgtttgctttcttactatctctattgccgtgctaggcaatcgacttgttatccaagctggccctgatatgctgtatgtttgctttctataacacaatgcgcattatatcgtttgatcgatcacagctttgatttgcagaatctgcatggtatctatatacttcgctattatatatctatttcagacaccctcaattgaacctcttctcttagtatcatttccactttcatgccttcagaccttgttgagcagagatctaaagccaaaaaaacaagcaagacaatgttcatgatggaaaagcaaattcgagatgattgaattggccagtacgaaatcctcacttccggaaagaacaacctgcgcagcgcgcgcattgcgtctgcctcgccaatataaattggatattgtcttctctctcgttttttcttcctcgctcaccttcactgcactcactcttgagacctatcctgcgaactttgcaagtctttaccggagtgtatcgtctttctgagatactaccatttcaccatgcctccgcgacggaaacggctccctgcgagtccgtttgcacggggatacacaccccaaatgagagcggcgtcagttaaccctatctcactctaggaagcaagatggtcgctaacaaaatatcgatagcgtggaccgaattccaatcccaaacgagtcagtattctcatcagtcttggccttcaactgctcaccgtcatagaattaaatgctgcgtctgcaagcggcatcgcccacagtcccagtactcgaaaaaccaactgggctacctccgccgggcaatgttcgatcttggctacaatagcatttatgaccagcaggttgctaagtgtggcccatgcacgaatgcccaggtttgtgaggagctctgtcatcgttgcggtcactaccgtgccattgaccaattcgccagaaaccaacgcaatcgcgacagtccggtatgtttgtcgtgagctacgcactttggctgcttctaatacttggtcgatctgatagatctgccagccctgcatgaactaccagatgtccctcgatcctgccgatcagcctctggcgatcacggacaaaaccgtggttgaggatcaggtagaggatgaggatgaggatgaggatgaggaagaggagctcaattctgagtctgtgggccattttggatccattggacaacccgagtctgtcgatatctttggctctactggtcaggccgtaagttatcagaacgacatcagctctggtcaagtcttggtttactcatactttgaatgcaggagagtttagagcagggcatcgagacagctctcgtcctgcacgatgattccactgatagtgatggcaatgagagccggaacggatttgcaagagtcaaggtgggtgcctccatttaacagaacttatatcgctccggatggacttctaacaaaactttattgtataggcgcaccgtcctcgtcaggcgcctgtccctgagcccgagcctgccccaggctgggcacccggtactcgcaagatcaatgatggcactccttggaaaggaggaaggtatctctaatggtttccaacaccgtgccacgaacaaccctcgggttatgattgacgatacttctatctatgggcacctcggctgctaggctgcgtctggtgttgcagtttacggcatgctcttcttcttctacctctgtagtactcctagtttctcacttgcttttacttacagacggttcgacttcagggtctgcccatgatgtctcctatgtctccagacgctctttttttgctctttcctccgggaaggcgagtttctagtattccagccctgtgcctggtgcatgtcttacgggcaacctttctcatattctgattgatggggcttttactacagggtggggtggacttctaagtccgcgcctgatataaccttgtccaatgatttttctcgctttcttttctggggtcctagggttgatatgtttatgaagacccattagattcaatagtatttccaaggtttgccttttgagctcccatgggtcggtagacaatagtgccatggttatgacatcggtggttccgttgactccacctactataaatattgaaatcagcagcttagcttgtcggtcgagttattgtatgataatcgatatccaggcaagttccagctatttctggtgattgagaactggaaggcagtggctaataatactctgttctgtcgatcggtgtcccagccgtcggatccgggccgacatttggcaatgacatagccctatctttgaaatagtgcccttcacagctctgataggcgcaagggaaactataatgtacacattgcatggaagatgcatgttaagtctgcagcggttgctatacactgccagatacatgctctgttagtctgccgatcgtgtgactctgacccagtctagcaatatgaaagagcatatgtgggactttaatatagcaaagggccaatataacaaagagcgaccgtgtgatgtgacgtcgagacagtacaaagagaatgaatcttaaatccgtctcactcgtagtgacgatatgatcgccacaacgtttcactcgccccccactagcccctccaccgtaatttctagcaattcgtaatctgtgtgcgcttcttctttctagttattctcttcaaatcggttacattttgcaaggagaaactacacgtctttgctaaagagaataccccggctacatctaaaccctcaaacctccgtatggcctccaatggaaattacacgagcaatacagaccaaacgggcaaaatgaacccagactcaaacgagcatgggtacttgcccgcacgtccacttccgtcctattatacaccatctcctcagaacatgccgcagccacagatgccgccaactgggtcatcggccccaaatctaaccccagagccatacaaccattcggaatcccagcgctcctctccaaacatgcacactgggcacatagacaatgcagtgagctctgcatttcaaagtagcggctccacaggctacctctccccagaaattatctcgcagatcacagcaacagtgatccagcagcttaagacaaatgggttggacaagctacaagggtccggtgcgcccccgcccggctcgcaatcacggcagccgccatggcaaacagatggcttgttgcagccgcataaggagactccctctgccatacctccacagcgaagcagttcaatccccccgcccacttcggcctctgaaaagttccatactgggaattccgagccatacgtcccctctggttacgctagtgacagtcatctcagccagaaacctgctcctgatccccatccatacgtctcttctggttatgctagtgatagtcatctcagcccgaaacctactccagatccccagccatccgtctcctctggttactccagtgatagtcgtctcagccggaactctactctcgatcacctgtcggatagacgtgcctctgtctccagtcagactagtgatcggagtcatcctagttactataaggcggaacgtccgagacctccggatcgggacgctaccgttatggagatgactactttggagcgaatttgggggaaattgttcgatgatggcaaggcgacgaagaggcttggccaatttttgcgtggaattgcggttcatatggtaggacttttgtctactctgacctactacggattataatggctaacttgagtagattgaggattatccgccgggaaacacccttgtcattcccccttataagttgcaaaagttctatcgtgacactcatgattcgaatgacccttatccatggcaaggttggtaattcgatctgtttattgacatgacatattctgactaaatatttagacatttttgatgatcgtacatcttcgatctcccgactattccgcgacatcagagtcgaacatcatctcatccaggacgatctagcaaaacgcccagatatcccaggcttaacacccaaaggcttcgagacctgggaaaccttgatgatcctcgcgaacccagagcgcgaatacgagcgactgcaaaaagcagtccgcaacatgcctatcaacaacccagaggaccagaaagagcgcttcccaaaggaaatcccgcgtcggctcttcccagagatcgcagatatcgaaatcagagaagacgtcgaggaccgaatcatggtccattgcggcgtcgatctaccatacatcacacccgaagaacgcaaccagacttctggccggtcggccagatcatccaccacgaccggatcgcccggagagcgaacccgctcatacgagagaggccgacccccaaccgcctcggccccaagacctgccgtagtcccaagacccgcctcagccgtgacagacgatgaagacgaagaagacgaagaagaagacgacgaggtagacgaaggagacgaaaccatcacctcggtcccgatcgagcgcgaacgcaatccctacagcaacagtccaagcattggcaaagtctacgatgaacccagtcctagccacaaccacaaccacagccacagccacagccacattggatcgacaccgggacaagctccagcataccgcatgcccgagtcctacgaccgcgagtcgcaatacgcacgctcgggatctggacattcctctgagaagcggttctcgcatgatccccgcagctcgtcgcatcaccgcggaggcagtggtacctacaggcattcggatactgaattgcatggtcgtgaccattcggctagacattcagggctttcggcgcatgatctgtcgtataacgagcctgctgcgaatttgactgaggatgaggcgcgcagatatcgccctagtcggggtggcgacgaggaatattatcgtgggagtgggcagggaggagctgtaccccggtatgatcagaagtatgaaaagtattacggatgaatgtggatttggattgatttgttttagtgttttgggttgcttccttttggcgattattgcattgcagtcagtgtcattttcctgttcttctgcctttcatctcaactctggtcttaattttgattcttttcaagctgggcgtggcatggatccgaggatacccctttttctggggttgtgcacgattaacgatatcatatttcacgacgttctgctctttcgaaatacacgtgagtttgtaattttatcaatagcatcgagaatgaaaaagtgcagcgcatactcaagttgtattcgtctcacttcgacctctcaaacccaaacttcctcataaccctctccccatcctctctaatctttttgagctccctctccctctccctctcttccttctcatactggagcgcaatagccctggcatgtctctcctcacgctcaacccttttcctcgcaaccctctccgcgcgcctcttatgctccaacgtccgctcatcacatctctcagcatcatcgcgcagcgtctcgacctcctcatcggtcaatacccatggcacagacaagacttcaataaggaaccgcaggcgggtatccaggaactgcatttcggcgttcgtatcacgcacaagccagaaccgctcaagatgtaactgcatctgcgagcggaaagttgacagcgtcccttttacccggactagcgttcctggttggagagctgagatgtctatcttgttgtggtctttggaggttacgtgtgttgtttgggtgaggctggtggctgttggcgccgtgagggagaatgaggaccatgctggctttcctgggcctgtggctggagtttcctggctagtggtgccgggatttggtgaggtctgctttagtacggctatttcgattgttgcaccactgctgtcgtctagtattaggattgtgcgtcgtgggacatcagttcgcgccactatgatgcccactaggctaacaaattggattggatggttgttgtagaagaagatgttttggcctgtgggctttgtcagttatgaggcttttgatgcagaaataggcttggttgtgttttggtctgatggaggatattgagtaaaaaagaaggcatatttctgggatattttggagcccgacagagtattggaacacttatagagttcgggtataatgaaaccgaagtctaaacagcctggtggatgtatcgaatgaacttattacgctaacgccgcctcattatcgagcctccgcgctagaggacccggaaatatgcacatgagcactaggtgtgtcgatctgcagggggcaggctcaaaaaaagaaataacatacccacgaagtcactcgattttcggagacgatgcacatcggccgcacccattttcacccaggtaaagtgcgtgggtgacgccttgaagcagaacgcggggtagaatacgaggttctcatggttgactattgtcattggttcatcttttttctcgaagtatgcggaatcaggacttatgaatctcaacttgggaatgtcgatttagggatcaggagtaggcatccgagcatgagttaccgctcttgccgacacctgattctgcctaccacttcccacaccgcctttgtctagaactccccagtagcaagaaagagaccgatgtcattatccaagaagcccttcaaccagcctataatggcactatataattgctggtttctagcatacccacaatctctatagatagatatgcttatctccgtccatcatcctcttcatgggattcctcggcagcgcctcctgccttttcctctcctcagcactgatatcatcaacattagtctccttctcccccaatgcagcccttacctcctcccgcgcattctcatgccccgcaaaagcaacagtcaagatctctctctccaacccaccaacatgctcccactcaatgcccgcctgagttaacatccgacatccctcagactctccaacaaacgtgccaggctccttaaccccaaagtaaaccttatggaccccctcccgtccgccttccctcgtctgcgtgatacgctgcacacacggtgcattcccagacagccgcttcccgcacggctccatggtcacgtacatgacgagcttgcggccgggctcgacggggaggacttcgccgactttgtcgtcggggactttgtgcactgcggcatagttggcgaagcagcattgctctgcatgtgtattgcccgcgagctccattgtgtaccccgtcgagaggatccggtcgtctgtgaaggtggggtcgtcgtctttgcgggatagtagaactgcgccgactcggaagttggtgggtcttgggggggatttttcagctagagagaggcattcttttatgtagggtatgtgaggggaggtgtttgtcgtcatggtgagtgatgccaattgcgattaggctgggtgttcggtgtatgaggggatcaagttgcgctttagatgtaaaatttggattttgaattggattcggttggtccctgtagttctaaatcgaagagagtgaagtggcgctgtcgatgagcttggggtgcttgataaaggcggggagcagcagcaaaatgacgaaatggcccgtcgcgtcgaaatcgcgttccatttctacgaccttgtgcagtcgccacttctattatcaattaaatccaagttcagtgtaatatacctaggtatctaaatcgcactcggttcttcgtctggtgtttgagcgcccaaaaaaagcctgtcgtgtcaccaaaacttgcaatggcgaaaaacacgaaaaacgaacaccatgcctcagacgaagaaatgccgtctgtcgaggaagatctttataaaatcctaggcgtttcatccgatgcaaccccagaagccatcaagaccgcatacaaaaagaacgctttgagacatcatccgggtatgcaaacccacgcaggttcgaaaacagcatgctaatctcagagcagacaaggtgagtgaagaagcccgtgtagacgccaacgcgaagttccaaagaatcgcactggcttacggagtactttccgacgcgcgccgacgagacgtgtacgaccggaccggcagcacggacgaagcctttagcgaagatggcgacttcaactggatggacttctaccgcgaacagctctcggcgatgctcgactcgcgggcgatctcggacttccagaagaaataccaaaactcagaggaggaaagaaaggacctgctcgccgcgtatgagacgcacaaaggcaatatggatgccatctacgatactgtgatgctgtccaatgtactagacgacgatgaacggttccgtggtattattgaccaggccattgcggatgaggaagtcgaggacttcgcgcgatattccaaggagcccgagaagaagaaacagcagcgtgtgaagaaggcgcagaaggaagcgcgagaggcagagaagttgggaaaggagattgaggataagaagaagaagaaagctggggctacgggaaagagctcgaaggctgcggcgaatgaggatgatcttctggcaattatcactaagcgccagcaggatcgcggtgcgggcttccttgctcgtttggaggagaagtatgcgcagcctgggaagaagcgtggtatcgatgatgagccttccgaggaagcatttgctgctgttggggctcggaaggggacaaagcccaaagcgaagaggaccaaggcctgagttagggtctttgtttcctgcattcatgtgtcatgagcgtttgtctattgtataactaggtctaatcggtgtttgtaattgcataccactatatccttcttcttactgacatgcaaaaaagatgtacaaaaatacattccaaaagacatttgtagaaggcgtctgcacgcagccaccgcggctgcagtaagtagcctcatcttccaaggttgggctccttctcccaatctttcctcttagtcccttctttatgttctttttctttcaatctcaattacagatagtgcacaaccatatccagtccgtaactaagggacgtcgacttgattgacttttctggccatttgagctgtcaagctgtccagctattttcttgaattcttcctactcatgcatcacaactaaacctgacatacattcctatcaccgtcataaaacaaggcgacctgctccacattcctcattgcttggcggagttgactgctgagtttccccacagcccggaggcggtgccgccatgtcgcaccacgctggtcgaacttctcccactgaacaactgaaaagtttggatggtcgatctacaatatcaacgacctcaataaaggagaaaccacctggcctgaaccgtgccttgcagaacctgctgattgccccgcagtctaagagtgcgggcgggacaacctattcgcccagagcaggcggaacccgcagtccagttgagccactggtatcatcgcctttgcgcatcagttattcagatatggcatccgctccaagttcgccggaaaggcatgccgcagctcgcgaggttttccctcgtagatcatccgaccaggttgttgacactgtccgctcgactacgggtcgcctcagtactgatgatgatgatgcgaaatctgatgtcactactacttccctagagcagccacacgccaaaaagcgatttttgcaggctagagataggtctcaaagccgcaagggtgtggctgccataatgtctggccgtctcttcccgagaagcttttcccgtggcagagacagagcctcatcacaaggaccttcccagcgtggagcgtctcttgactcccgttctgcttcttcgccggagcggggtcgccccagtctccctagtagtcattctgttcacgttgaaaccttaactcccacctctgttggttcagggaaggggaaatcactgaacatgcacgatgcattcaacaagtcagacgaagcattggctaggccccatggaagtggaagcctccctgattatatcaaacccgctgtggaggagggaggggagcgaatagccaaggatgttttcgatcgtgacaagaacatgattgaaagcagtgaagatgaagccaacgacacttcgagcgatgaagacagcactctggagggtgtacgaggccgtaagaaaaagaaggactcggatatcacatccataacaccaagcgactttgagaaacccaagagtgacgattccaagcagtccgaagaacgtacgttgccttctcaggactatgttaaatatgaaatccattgtactaacctcatattttataggaaaagtttccggagttccaagtgaacgacaggagaagaaaccgcgaaaatctgctttgaaagctgtggtccatccacagaccagtttcgacatccccaccccacgtgttcagtccatcgccggcacaccttacggctcagaggatgaagccgagattggtgacattcatcgtgcccagaagctcagtatttccatgtccgctattgataacggtgtttacaaccgatccatccgaacaattgtccgcggggacttcttaggtccgcaggatcaaggcgatggtagccgtcgtcgccgtcgaaaatacttaatcgcaactgacttgagtgaagagtcggtatatgccctcgagtggactatcgggacggttctgagagatggcgacacgattttcgccatctacgccatgcacgaggactccactactgcggcagcggtgcaggtcggcgagggagctagggtgatgaaagatacaactgctgtcgttggcacccagacgaaagaagccaaccagcattatggatcccgtacaatccttggtcgacttggccctggtactgccagcaagacacattctgttgattcccgggcatcgtcaatcgccgaggcagaacgagtgagggcagttgagactgtatctcagacttgtgtgaagttgctacggaaaacgctcttacaggtccgtattgctgtggaagtgatccactgcaagaatccaaagtctatgatcactgaagctgtgagttttttttctccgttctcaaccaccctattatctctggtccatgcttacaatgactctcagattgatgaacttgaacctacactcgttattgttggtgctcgaggtcaaagtgcactgaaggggtgagtgacgatttctaatccgatcttatgctgctggtgacaatactaaccttacttttagtgtccttctcggctcattctccaactatcttctttccaattcctctgtgccagtaatggttgcacgccgaaagctcaagaggcacacgtggaaagacaagctcaagggcactgcacatgtgcgcctatccaataatctaattactccgaagagtctttctcaagccaaagtggattgatctggtgtgctttttttttcatgttactctctggcttgtcttttcactcatcgggtccatgcaaggcgcctatcttgcactgcgtttgaaggcgcattagacctgggttatcaatatctctatttaacgcgtatggataccctacttttcactggctcaggatctcacaatatgatggctctttcttagtttacttctcgttcttaacctgctcttaatttaggtcttcgacattattgcttgtggcgcaatctgctcttaattgcttagacaccttgaataacagtactttgtataatgtagaaaacagatatgttcctgactattgcttcattcacatgtaactatacctttgcgccgggcttcgacccattccaagttgggcttagctgggcctacaagatagggaacgagcacctaaacgccaagacatgacccggcctacgcacctcatcacgtgcaacgtcaccgcccaagctcccccatcgagacagctggaccaaccccccagtcccacctttgctctattccccatccttgcatttttctactctgaatttcgcccgtggaggatcagattcgctatggccgactctattgacccccggatgccctccatcaaaccccggttccgttacaataccatcggaggcattaacggaccgctggttatcctcgacaatgtgagttgacgatgtcctgacaatgaagcgggaactgtatgctaatgataaaattgtcaaacagatcaagtttccccgttataacgagatcgtgtccctgacgctccccgatggcacagagcgcagtggtcaagtgctggaagccagaggtccgttccccacattctgccgttccgactaggagtatgaaagctgactgctatatatacaaataggaaaccgggctgttgttcaggtgcggactaatacctcgtcgctaacatgaaagactttgaattaacgtggctcgtttgtgaattaggtgttcgaaggcacttccggtatcgatgtgaagaaggtacaactatccgttgaaatggtttgaatatgtgctgacatatcgttagaccaaagtcgagtttagcggccacagcttgaaacttggcgtctctgaggacatgttgggtcgaacattcgatggctcaggtcgagctattgataagggtcctaaggtgttagcggaggagtacttagatatcaacggccagcctatcaacccctactcacgagtatgcgcactttcaccgatctaagatggaactacggaaagctgacgaacggataaggtgtaccccgaggagatcatttcgactggtatctccgctatcgatacgatgaactccattgctcgcggacagaagatccctatcttctcggctgccggtcttccacactcggagctagcagcacagatttgccggcaagccagtctagctaagcccactaaggatgttcacgacggccatgaggagaacttctccatcgtcttcgccgccatgggtgttaatatggagacagcccgtttcttcaagcgcgacttcgaggagaatggcagtatggagcgtgtcactctattcctgaacttggccaacgaccctactattgagcgtattattactcctcgtcttgccctgaccaccgccgaatactacgcataccagctcgagaagcacgtcctggttattatgactgacatgtcggcctattgtgatgccctacgtgaagtctctgctgccagagaagaagtccccggtcgtcgtggttaccctggttacatgtacacagatttgtccaccctctacgagcgtgctggacgagtacagggccgcaatggttctattacacagattcccattctgaccatgcctaacgatggtgcgtttcttaagtcacactttcagcgaatacaactaacccataccttcagatatcacccaccccattcccgatttgactggttacattaccgagggccagatctttgttgaccgtcagctggacaaccgcggtatctacccaccaatcaacgtcctgccatctctatcccgtctgatgaagtccgccatcggcgagggccgcacccgcaaggaccactcagatgtgtctaaccagctgtacgccaagtacgccattggtcgtgatgccggtaagcagcccacccttccacatcccacaaacatctctaaccactccaaccagccgccatgaaagccgttgtcggagaagaagccctctcctcggaagataagctgtccctagaattcctcgagaagttcgagcgcaccttcatcagccagtctccctacgagtcgcgcaccatcgaagaatccctcgacctcgcctggagcctcctccgcatctaccctagggaactcctcaaccgtatccccaagcgcattctcgacgagttctacgcccgccacgcccgtaagatccctaacaaggatacccgcgataactcgcatgagaacttgatcgacgcatgaggaggtgatgtgtgttgagctgaattctagggcttgcgcatgttgaattaaagtactgttcttgttgtgcggctgttcttatcttttggttgttattttctttctattcttgctcaagcatgatacattatcgaatctatttcaggggctattctggctctataaaatcatgatcggtttgttcatcggttccgtgtgtatagaggtcttttagaagtggtgggtaatagactgctattgttctagaggttaaagatatctattatgaagacagtcccgaaagatgaagaaaaaacaaaagactaaggggatatcaatttttttattttacttttacccaaaaagagtcgccaatcagaacgcttttcccaaaaccatctcgcaatgtagagcataagcatcaaggcatcatgaaacctctctagcaagacagaaccaaaaataaaaatgaagacaatgaaactgtgaaaggtatttcattctatgcaaagatcgaaaagcgctcagaagcgcagatcccagccgatcttagggcccaatcgaggaagctcgtcggcgacctgctggacatccttgtcaccgcgaccactcaggttcagaacaatgttctggcccttgcccattgtcttggcgacttgcatcacaccccagacggcgtgcgaggactccagggcggggatgataccctcgtgttgggcgagggcgcggaatccagcgagggcctggctgtcgtcggcagcgatgaaggtggcgcggttggtatccttccagttgctgagttcggggccgacaccggggtagtcgagaccagcagagattgagtgggtgtctgagatctgcccgtgctcgttctgcaggacgtaggtgcgcacgccgtggaggacaccgtgggagccaccggagagggtggcggagtggcggttggtgtcaatgccgtcaccagcagcctcgacaccgatgagcttgacgcttgggtcgttggagaaggggtagaacatgccgactgcgttggaaccaccgccgacacaggcgatgacggcatcggggagtttgccaatctgcgcctgcatctgctccttggtttcgttgccgatcacggactggaaggtgcggacgatggtggggaatgggtgggggccgatggcggagccgatgatgtagtgggtggtgtcgagttcgacgacccaggcgcggagagcctcgttgaccgcatcacgaagagtgcggcttccagcctcgacggcaatgacggaggcaccgaggagcttcatgcggaagacattgagaccctggcgacgcacatcttcagcacccatgaagacggtacactgcatgccgaacttggcgcagactgtggcggtagcaacaccgtgctggccagcaccggtctcagcaataatgcgggtcttgcccaggcggcgggcaatcaaaatctgtccaagagcattgttgatcttgtgacttccagtgtggttaagatcctcgcgcttcaaccagatgttggcgccgccaacgtggtcggtcaaacgctgggccatgtgcaggctgctgggacggcccatgtaggggtagtaggagcggaattcttcccagaaattgggatcgttgttggcaatattgaagccgtgctcgagctcggccaagcaatccataagggactcggggacatactgtccaccgaactcaccgaagcgcgagggctgggcagatgcatcctttgtgacattgagggcctcgagctggtcggcgagaccaggtccggcgggggtgtcggaatcggtgatcactttagtaggttgaacctgagcagagggctgggccttctgaatggcctcgagaacattgatctcgtgagtcagagcaccggtggcatcacgctcacgtttgcgtccagtgatgctggaaaggtactcctcggcagccttggcagcctgcccagcaggggccttaccaacgcaagtgataatttggctgccaatgacaacaccctcagcctgctcctggacggacaggaagtgctcacgggtgctgacaccgaatcccaatgcagcaggaacgttgccggagtattcgtggacgcggtgcagaagctcggggatgtttgcgctcaatgaaccagtggcaccggtcacacccatgcgggagacgacatagataaagctgtctgcgatcttgcagaggagacgcatgcgagcatcagaagtggcaggggcgataagggggacgtaggagagactgaaattgagtaagcatgctgtataatcatagacaaatgataaagatttgaagagtaaaaatcaaggaactcacccagcgcttgagcaaaggtcacggaaacggacagcctcctccgggggcaagtcaaccatgataaaaccattgacaccagcctccttgcaatcacggagcatacgctcctcaccgtacttaaggacagggttgaagtaacccatgagcatcagcggggtctgcagaccgcggctgcgggcagtgcggacaagctcaaggacggtagtgagggtaacaccattctcaagagcctttgtgttagcggtctgaatggtggggccatcggcgatgggatctgtgaacggaatgccaagctcgatgatatctgtgatatgagaccgaatgttagtaaaggtcatccctttgatcaactttcactttgggttgaattaccggcgccgccgttctcgagaccgaggaggatatcaacggcctcctcaacggtggggtatcctgcggtaatataggccacaagggctgcacggttctgtgccttgcacttcgcgaaggtctgcttgatagcttccatgatgcagggtaatgtgaaagtggcggggcaaaagagtgtggtgagaaggaagaagagaagaggccaatgggaggcaaacgatccctatatatacgttcagagatgggatgcgttacacgttaattgttaggtcagggatggggtgagatgttataaaaaagcaaacgatctgtatgagtcaaatggaattgttctttttagaggccggtttcgctgggccccgcgtgtcacgtgccttgataagatagtgagtgtcacggtttaatgagccttttcccgcctttttctgccagctaactaggaagagagcgagggtatgagaagaaaatgttatctaaaaagatttctaataagacttatatcaaaaagacatgagaatgttgcataagccgctgactattcctgtacatagtagggatgatgtagggctgagatttccacgtgatatgctctacatccacattctacaagagaaggaaaagtgaaagaaatttcatctgcaatgtaaaaaaacttttactcggaataggtagattaaggtagaagataaggataatgaacggcccaaccgttcaggtcccaaacgccgtaacaatgcagtaggtaggtagtaagtgacaacaaccctcagctgaaataacaagaagtggtaagtaccgaatgaactccagccaaaattttcaaacagagaagtgaaaatcaaatagggaccatgggaggaagacccgagaccacgaagagaacttcatagtgtcagagatcctccacccaagaaccccgtccaaaaagcaccaagcaattggatgaaatggacaaaaccgccaagattcccaaaaaagaaacccaaagtctatcccatttccaatccaagaataacccgcgaatgcaaaaggaatgacaagcaagcgcccgctatgctgaatggtagtacaaaagcccagaatgtatgttttgtgcgcaaaaaagggagtggaagccacaatgcccggcatgataatatgcaacccaaggaaggaatgaataagacaccgtatagatgcgaggaagtctcaagtaagacaatgtccaaaatgtcaaaaaaatcaatcgcaggaatgcaaaggccgcatgtttgggtgtatggttgagggcatgaggcatcataatgtaatgtaaggacggacgtgaatcatgatcaaaatgtgggatgcgaggttcggcagataaaatgtcttttgataccttttcaggtggaaagagaccttgtatcagacggacggcaacccggtgtctgggcttggtaaggagcgacgtgaaaaggaaaatcgtatcttcaaaaaggcggaggggaagtatgaaaaatagaatggaagaaaaacgcagcaagaaatcagataggaggaccagccagcagggggatcagtggccgccgtgggcggtgtcgtgcatggagtacacgggatccaagtaggtatagcacccgccatttcctggtgcaccggtgtgaggagtgttgtggccgagagggtgcatgtcccaagatgctcgcggagccgcgggtggcagaccgttgtgatggctcatggctggatacgagtatgctccagcagatgtatatggctgggacactgcgctcatagaccggatattgggtgccgaagacaggtgggaggagtggtctgcctgcgagtaggtctgcacgggcataccatggtagctgtggccagcaccactgtcggagatagactggggggagttggcagtgtgaggctcggtgccggaatccgaaccagtgccatgactggcatggctggtataggtggtggtcattggtgtggggatggcactggcggttgaggaatagctggcagacttgatagaagagaagattagtaatttgtcacaatcagccgataagtttcaacatacgtatttcccaatgatcttcttcagtgcctggctcaggaccttccaagggaacaccttgacatccttctcgatattgcggggcttgggggcggggaagcccatgataaccttgaagaagtcttcgctctcgaccttggccttggagacggtgagggggcggaatccctccaagttgcgacggatccgattcttctcttcaacagtgaagcgcacagccacgagggactcgagcagatagatggtgtcgacactcgttacgtagcactcattcttgtcctcccatgaaatgcagctgatgcagatactgttgggggcgcgatcgtcgggagaaacagccttgaactcgccctggatggtgctgccagtttgagagcgggtgaattgcaccaggcgacgtcggcacgcgcgttcctcctttgtccagccttgtgtcatagtatcgagatcaccgttcaacttgaggatagccttggtgggatatatggcatagggattgaaggctgggttgtggggcatgctgtgcgtttgcatggtggaggtacggatcaaagtaggatttgaaggaccacgctgggggggacctttgtgctgaggaacatgtgtcaaggcgagaccgttccgagcatcattgctcacagagacgaaagaggggctccaagccggggtgataggggaagggacacggagggcgggctgggaggcggcagatacagaagagtaatggccggagccagtctggggagaggatgcagagtgatatggcgcgacaaatccaaccatggcgggaagaggctggaggtaaggcgagtaggacgctgatacagagcggccgtgggagccctcgtggtgctcaaccttggggatcacggatccgttgtgtcgtttggcagatgccacaggagcatcagagtatgaaaacttccgcttgcgggaatcccctgatggcgaagggtgggaagcttgctcataagtgtacacaccaacctggagagaagtggcgggacagtcatcttgggtctccatcaagacggacagaggaacagcaaaagatggggatccagtagacaagaatgcaggcacgtcagccgagagaccgtactggaacgcagagtcctggaatccgaggaaatgtggaagcgattcacacttcttggagccaaaaaccacatacaaagctgcgtatgaggaagcgtggaggtcataggggcactggatctggaccatcaccctagttccctcacttccccgctgggggctgtatgtcacaatttcgggtagctgacggtggcgtgcacccatcatgggcgactgagactcttcgtacgagctagcgtactcgttgggcagatacggaacacagtccgagatctgacttgcctgatcggccataggcgaggggaccatggcggtcgtcacataaggcgattggccgtagttcgagtaagaggcagcatcatgcaaagatcgagtggaaccgtaatctgtgtttggtctcagcacacgggatgttccgtcgcaaaccaagttcttcagctgcaacgtacctgtgatggcgccggcaacgggcttctggaaagcagacatggacaatatgggctcggacttggcccacgggccgtctgaaaatgcaccgataaactgtgatccttctgagtccgacagatccaacgactcgccgagtatgagaggcgtttgaaaatccgggtcgaactgtgacggaagaagaaacaggtcagcgggaaggtttcttatgcacacgggaagacagaatgcagtagaagattcaaacagaatgctatgctggaacacctatgcaaaacatgcgggcatccacaagagacaagtccaaagttaggctgggaatcttaccaaaacaccgtgtgtcttcgaataagccagcttgaagatgttgcagcgagtgcaacgagacagaacctcttgaagcgaatgactgggaatttattccaaacgattgtagggtcgaaaagcacaagcaagaatggagtgctctccgagacagaacgagcgacgagatgaagctgctgtcggtctcacaaaaatagcggcaacaaaaggcctcgaatcaccatccagcaatcaacgactaatgctgaaactaggaacggctggctgcagaaatcgactcagatctcgaccgtcgtgcccgacagttcataaagagaagccgaagaactagtcgcttgacaggagctgtccaagaaaggtccaccgccaattgggacgggagagccgagattggtcggaggatgacgagcaacgagcgtggactggcgaggtttcgcttttctttatttccttgatccgtgaggtgtttcgggaaagactttcagcagattgggccacgatgaagcagatgcagatgataggctactcaattaatgagtatacgagaacgttttcagactataggaatcggatgggtgcatagggggaatgaactcaccgagatgaatcaaagtgaaatagaaaaggaagctctgatgtgaaaccaaattcggccgttgactatcccagataatatgcaagatccgagggtcgtcaaacctgaagagaaagctaatgtcaacaacaaacacttgaccagagcgggacggggaagccatccgacggctttgacaactatcgtcatttccagtcgttggtatagttcagcgaatacaaattgcggctgcaaggagatggcataaaagatcaagagccgaaagaggaagtatgcaaggcacgaggggcacaagtgagaccgtgggcaaagggaggggtgcacatagatactaaccttaagctgataaagcgatctgcctgaatagttcctttccgggtaaccaatatttcctaatggctctgagaccctgccaaacagaggcgattccgcaagctttctggacccagtgtcttccgagacagtcaagcgatggttggatttccgtgtcctgtcgaatatcccgatatccagtgggtagtttcgcctgtcgcaagtacaaaagcccgaagcgaatcctttttttttttttggtttcgaatgttggaggttcaactgacaccgcggagcaaacgggatctacagagatatcgcgcaaacgccgggcaagtaacactttcttcgtccccttagatccaaatcggagtggttcgaatataaaaaagaattggcgaaaattccggggttcccaaaagaattaaatattaagtcgagttataattccaataaacgtagcgaacgtggttctcgtagcggcaggtaagcgagcgtaagagcgaacgtggtgagcgaatgtgcgacttagcaagtcataataaatttcaaagggggatggaaagtgggatgcaaggaagatgggaccagaagggttaaaagcaacgattgaggattatacggaatattattattagcagtcagaacagagcagggtcgtccctaaactgtatagggccaacttgtggggggagggattttgtttttttattttttattttgatttgggttctttttattctttttattcttttattcttttgcggattagaggattcataattattattaataaaccgaaaattcaattagcagactaaaagactagtgggaaatcctagcgggggatgcacagagggtattgggtattattacctttgtatgtaggtacatctagatgtatacctacctacctatgtccttgtacatcttttcccgtcacacagtctagggttagaatctcgagtctcgaatactcgaaatatcagaaaacaagggcggagcatacacaaacgacatgaccagtgtgtcggaaaccactagaagccgacttgttatgctttccgagatgtccgaccaagtccgatccacctggttttcttaagataggactagggtgttcaccaacgatctgggacttgctccaaccttctatttgcagaaccttgaattgatcattcaacaggactatagcggtgcatcacgtcggggacggaagaattggaacgtggtgaggttcggaataaacaccaatctggcggcctgcgccactagcaaaagaaaaaaaagtggggagtcgtccagcatgtgggagaaaaaaatattttatatacagaagaggaaggacgttaccatctacatgaccggttaccttgtgtgtatgttgtatgttgtatgttgcatatgtgtatgtgctgtttcctgagcatagcctctttgttagtactgtaaccctagacatccatgtcgaggtcaggtcggtccaatcagggttggggtctataacaaggactctctccgaagccctcctctcttactatatccctgccaatcacgaagcttcaccggtaaccctgttagctccctacttcagcttcgggtacttttccattcgagccctttttatcttttagtcttttctttccaagcatctccttacgcccacccttgggccatgccgcaagtggaaaaagagacccttcctcttttctccagatgctccactcacgatctccccaacggaatagggtccgtcacgatcgtacggagtacatagtacatacatctcgtgtcgtcatgccgggcaatatgacaattcacatttcccgtttcctgacacgaggctgcatgtaagtatgatgtgtactcccttaccaaagtccccggataattcccgatcgtcttttccacctgatgcattttggtaaatgtcagaaatatagaaatagacagcataccaaggatatcggacggagtactccgtaaatcaggaaaggataaatatcggattacacttaccttggtcatccaagctcgggttttccaacacgagtctaagtttagcacaccttgcattttcaggtgactcggtggcctgactatgcaagggtcctgcccggtgattggttctctgatcttccccctagacccgatcgggctatcactcttggacatccgtgctcccctcgaggtaacgggaccgttccattatcagctgcttctgcactgtcaccttatccgggactcgtatatttagatcggcttcgtattgagatcggcttcgtattgaggatgtgatatgatgtcgatattctgcatgtacatgtactaggagtcgtgtacccaattcccattccaacggctcccggcccacgggctatctccaatgcgcaggagatcattagtgtttgaataattacccgatgcagcacgtcgaggtctgcagttccgtaggaacgtcaaccatgctattgttacagatgcgatgcagatgcagccgcggacgcagacgcagacacagatgttgaaaatagaataaatctccgtacgggtttcttgtttgtttcttgattctatttaatcctaggtggcctctatgagatcatagactgaagggctggatctgatatatcgacattattgacataagtttatttaggtgttgctgactccgacataaataaaagaacactaaccctaaccgggacataaacggtcggatgcacacctccgactattatttcgtgcagctccagccacccacgatgtaggaaagggataaaaaggggcagataaaaactatttgttttgaagcgcgttacctatcgataagatatgcactcgactccgcgattttgccacgttgaagacgtcccgaggtacgatgtactccgtactccgtgctcggtggacactacggagtacggagtatgcgattttatgtatccgattttatgaccaaatcaaggcatcactcaaaattcggtaatggggctcttgagaaatacaatacaccagtggagcgcgcaatgatcaccaatctgcccaagaagcttcaatcggatcagcgatcgcgtccaaaacagtcaacggcttcttcaggcatcttcggttaacagattagattattgtctgatgccttccttcttcccttgccattcgtcaccggatagttaataatcttccctacatgcaaactgtatcaatgtccatgttcgtgttcctcaactcccaaccaccccaaccaccccgaatcactatcaaacagagcaaggagcgcctcatccaagggaccaatctaatcaatcccaatcatccctttagaaattctaaaaaccaatggataatcttattagtttgtaacggaaacatttctccaattggcgtttgcactttaatcggccaatcttcggaaggaatatcagtctccacctcgaaacccaacccccccgaacacccgaaaaggaaaaaaacgcgaaaagcctgtacgaattaaacaccaatgcccaaaagcagagcttgtatcccgactgatcaatcccgtctcttggctagtgtgtcaagcaataatttggatcttccatgtccttggaaccttccaaagtaagaagcggatcaccatatccccagttcggacttgcaaccttgtttgaagccgccaatgctgtacgcgacaatcctattggcaggtacacgccccatccatatccatgatgatactattgaccgggtggatatccactactccgtacctagggcttcgggctctccggttcctgcttccatcttttattgtttattattctgcttattattctgcctattggcaaaccacggatgcctatcaaacgttaattggagactattacatactagattattccgcgcgaacgacatgctacccatatgctttagatcgacgtttaaccctaatcccttgtatactaccggttaaaagggttgaacgttacttcttacccacttaccctttctagggatccaacattgggaaatatgcaggtacagacgcactattgcctgcgcgtctacttcctatccgccaatattatgtacgtggtcgcgccactcgtgcctgtctgtgtatgtatgtgtgtgtgtgcctgtcttgcgtgtgggggggggcaccgagcacgggttgaggaagattattgaattattgggtaaggatcttcatcatcgatcccttcgagggagaagtccagggagaagtccagggagatgactatcaaccttgctgtatagtaggatagggattagtgtgcgggccacggggaagcataccctcggagtgaaacatcctcagagacactgacggctcggtctctctttgccctggttcaccacccttacattttatttcagctcctcctggttctgttcgtgaaggagacaaacggcaacgatcctcggtttttttaaccggtgtcttgatggggtggaagatcactggcctacccttgttcgcatcagagtttagtctgcaccacagctcggaggaatgtgacgtggacccgctttgtcttggggtggttcgactattcactcacatctctgtctgttctggagagaatatcggtgttggtatctttattctacgtgaagggagaagagaaaagacaaagaccggcttttggtgttaggcctactggagttggacgggaatcagctgtcacccggctatccgtgacgaatggcagatgaaaatcggcaaatcaccactcggcatcgactgcatgtctttggggactcttttctcttttttttttgcccctgcaacgaggaccttctcctacagggcagcctcttcgtcgatccccccatcgcagagagggaggtgtgaatccttgacatcagctccatatcgatggccactcatgagcggttatttctcagtgggaactgccgttcctagctttaaccttctttggcccctgtcggaaaagaagtggctctcagagtacgcaatcagtacaaagtacgtacggaatgcccgacaaatgaatacacccgaacttagagcgttaatggggctcgaccccttcccctaggatacttagcgcctcacgactattcacggatgtcacagataaaaaggaggttaacggtttcaggaagggagctaaaagctgacagatgccgcttcggttagtgtacggctcggcagtattcgcccacactttcctctgttccccggtagcatctcaaaaatgagacagtggcggaacaagatgatcatagacttgcggtcaaaactgacagcaggaatcagcctcacctttgatattgatatttgtcacgctcccattttcaaagaagtgaaagagggctggctaacaggtatctctatcaccgatgctgcttcccgtagtatctgaatcgaacctattcatctcaagctcgcatgtctcagcgtggagagaataattagaagattggaagactgccaagcatgtcttactcggtttcggggactctttactatttgcaaaatgtctttagcatgaccaggaagtgtgtcacgctaacactgttgatctttacccactggcgtcgttattcgttgatttgtatgagaggagcctctgtccggggacgctagatttgacgcgagatcccgtgtcctttgagttttgcttattttttccatctcgtatcaagaacttgagtgcatccactcatattagacttattttagctctctaataacgtgtagcttcctaggcgctatagccgagtcaggggttgcgagacagatcaccatgacgatccagttcggattagaagcttgggcggaatgggatcggggagatgttgaatgtactccgtacgattatagcttattcgtatttgcgatattacatggatctgatgggtgggagatcgtagtacatcaaagctctgaactttattgtttttaagttatgaaaaatggctagtgtgaatgatggtaggactaaatatatatcggttgttatagagcaatatatagagtatatatcaccacaatgcaacagcagataacttccgattgcttcaccgcgccaaacgccatgataacaatcctcaccaaaacccaatcgaatcgtgattcgaaaccatctaagtcgaagtacggtttcaggttgatggaaccgacctaatctgtagcgtgaaacactttatttatacttcgacatacaagtttagcttgatgtttcaacccactttaagctaggaactaaaataaggaccttcagagtcgtttataacattgacgctataatatactccataactagcagtcggttctccggacatctaccacacggtagagatatatccatgaagtgggggggggcgtaaagaaagtcccaccaatcagagcacggagaatgaattttcaatcccgggatcactctcttcccgaggtccgaacttttttagcagcacttgtatccaattttggcagcgcattgcgtaccgaatcgagttcgttgcttcactaatagccccagtcaaccgctcctctttggtcaattggtagactctaccctggttccgacgtaagtaaagtgcacggtctatttatccatcgctttccactttttttccatgctacactgtccccacttgaccacgttgagtgcatatttagtccgtgaatgccaagataggcaacactctttagtgcaagaaccaaggtcggcttatcccattaaccttttgttaagcttaatctatattggtagcgaccttccatctatggtacatgatgtacgagtactacatcgtatatctctatcttggatatgccaatataaaagacctgttttcttacttcgctccactgacgtatctccaccgaattagatccacaaaggcgcaagagtgaaaacaagaatagcaactaacttcgtcgcaccaagcacatccatgattagtcaacataaacatatctgtggggaatggagagcttggcagccggaaggggcatagtccactagcaaagcgaccggaagaacgtcggaagaacgtcgaagcctaacccaacccgagtcgaaaaacgccctctaaaaaaaacaccccaagcccacccaaaccacagcaaaagacccttcggaacatacccgagtcggggggagttggagaccctgaaaagcggtccacgaggttgagctggagagcgttgcgctaaccttgccaagcccaaccacccatgcggggcggtatacataccgcttagggctgtctcactttttagttcgcacttatcatttggcatcgagcttagtgtcccccgtgtggtgtatggactccataatagatgctattattagcgagcgggaagattgttgtgttactactactccgtacaaccgactgaatttcccgttgactgcctgatgcagcatgcgggccgattgcgttttgagatcgtggacgtgaggtttgcatacggtatacagcatattgcttattgttggctgttcagctgttcgactagaacaacgccctgctagaagtaccggagggcttaggacccctcaaagcaattgtttggtttgtcgattagagttatcggtgaatattagggtttgatttcgatgcaacggtagtgttgcagtctgttgcccgatcggttgcaagtacgtcgatcgctgaggctgctagttcatggtacgattagggttatttttttagagtcatgccgtgcgtcggggtatgaccaaaaagacactgcattctgacggctaacgataataatagactcggcttctatgcggcaagctgaaatgagacacgatgatcacaaccgcacggggcagaacaaggtcggaacacagagcaatgacccacaaacttctagaaatagcagatctctaaacagctaagcagtatcgtacccactaaacaatccctctttggacgattcgcccgtaggaacagcaaaagaaaagcaaacgcggcgaggccgaaggaatcctctagaagatggaagcgctctcgtaaacggtgcggtcgtagcagacgggaaaaagcttagaccagaaagcgtacagttcgggtctgtcttcccgcacctcgaccagccatttggcgaatgcgaactcggtttggaagggattcgggcttcgataaggagcaacctgatccatgttagcgcgggactagctaggtacctggagtcaagaccatggcgataactcacctctgaatatctctgcagcgcctgatgatacttctctgacagaccgagcttacgaagagtcggcatgcggattcccttcgccgcgatgctatatgcatggttgagattctcgcgttcgacaaatgagaactctccaatcacgacgcctcctggcagcttcttatgctgatgggcgtgagcaacttcgatcagacgggtgagcaagtcggcttcccagttctcgaaaagaggatggcggaattctttgatgtgtcgctggagcaaccacagttcacgcttcagacggactgtattggcttgcagttttgcgactcttcgttcgatgtgcttgttgagggtttgcagggcatagtgagtggcgtcgaaggactttattgactgttagtacattccataggatcgatgtttccccaatgcggcaatacctggaaactatcctcgtcccatgaatcttctggggcacgatgggagtctgatatacggggcacatggccatttccgcgagaaacggagcgagagactcgtcgagtggagatgtgatccctcttggagttcatagctggggtggaatcggaaatgaatggaagaattgttatacaatgagcgaattcgagattcagttactcgatttgattataataagtgaggatgaaatataagagtggcgatggcatgctgaagatgagaataagtaacaaattgtgacgcggtgatgcgtgaagtggcccagggggaaggcacgaagaacactggtgattgctgcaaaatatctcaattgatatgtatcataggtgtatagacagccatttaggcatcatgaattcatgggaatcgtagcaataatatttcacagcttactgcccgcagacttgccaaattcaatcaccagtttgccgaattgtgtgcccttcttcatatcttcgaacagctcgtcgattgcggacaagtcatctagctcggtctgcagaactcgcgacaccacaggtcggatcttcttggccttgacgaactcaatcatctccttgaactccttccgggagcccatcgtggtgccgcggacgtcgatattcttgaggacagcagtcatggtgaatggcatcttaggagacacagtcattccatagatagagaggacaccgccggccttaaaatgtgagtactttcatctgttattgaatgtatatcccgttgtcgcactcaccttgagtaacttgacagatttctcaatagaatcaccaccggcaccatcaatgatggcatcgaagtttctctttccagttgggagcatacccaacagcttcttttcccagccatcttccttataactgacaccaccggtcgcacctagctcaacggccttttgaatcttctcctggctcgagctcgtcacaaagacatacgcacctctggcaacagcaaatcgtagcaccatcagagccacacctccaccaataccagtaatcaagacagcagcaccattcccagagttcctctcaccagccttggtaatcagagctctccagcccgtcaagcccgtcaggggcagagccgcagcctcagcatcagagagatactcaggggcctcctcgacctccgagtactcgatggtaatatattcctgcaatgtccccttatccaaaaccttggtgcctcccataattcggtacccagcaggatcctccgggccatcaggcgaatccttccagccagcaccgggattcaagatcacccgcttgccttgccattgctctgggctgggaacattcgggccagtgccgacaacgataccaactccatctgcgagcagggggacatcgaaggtcacgccggggtagaggtgttggcggaggaagaggtcgcggtggttgagcgccgcggcggtcagtttcaccaatagctcacccccttgcggggaaggcttaggcaccgttcgtagggcgagcgggtaatagacttggcctggtttgccgggcttgccgtcaatgggagatatgtaaattgctttggacattttggatgcgatggattgatgatatcaaaaataaactaataaactgaccttgactcaaatcggggcgctcatgcggggatgcttcaatgcttatcgatagccgaggtttctttgatttcttcgattacacgcctgggcccgaatgtccgagactatatgtcggacgattgatggaaattggaaacctgtatctatatactctgatagagttcagaacgcgaagctcgaattgaaacaaatcgtaatcaaaagcaacgagattcatagtgttttctcctgacgtcacagcgcttagggctatttttgtagctgctgtactatagcctttcacagtctttacattgtctttgtgtgctgcatatttcgctagtatatcaggagagctagtttagaatatttgagatctgctatccgttgttggttttgcatctcccgggaatatatattgtagctggcaccgaaatatcaagaatcattaatcatccccttctctatgcgatagtagaattcatgctatgtttgatgaagttattgactacataaatgagagggcttagaccttgactataaaacagagattacaataatgccaaaggaaatgtcagatttgaaatacaatatcaatttgtctatgagcgtctcaataaatcaaaaaccgtacgtcagtcacgagaagaacagtaggagataacctgggcctctgaggaaatgagagaaattccaacaaagctccatcaatggcaacagacaggaaaggagaaagcagcaagagaaaacatgaaaaaagtatgagtcgtccttctattgaaatcaaataaaaccaccgagccactgagctgagactgttcacttcctcccgcaaacccagccaagtccacactcgaatctcggacgacagcggtgataaaaagtacaatgtctctcgtccacatccctatcatggccaggcatggcctgaatagaggtctcagaagcagcgtcataatcataagtataatacccagagttatcggcatggaacccatccacgtggaaacggccatagtgctgagaatctggtctggaagacgtacgcttggatgaaggcactggctttgggggaggcgtcttgttgggaggagaagcagaccgtctgtaagtgtattttgggtctgatttgacatccaagctgtggcgggacttttcactcgaccggggaaagcgcgttggagatggcgtcggtctcggcattggcgaaggcacaggcatataagctcggcaggattccgggtggctttcgcaataagatgctttgcgacagtggtgttgaactactggaccggagcgtggtgctgtggtgaatctctgagctgacatggcaggtttgttgggacggggagcatgggcctcgcattggcatttctccatctgcggatgatgctctggttcgcgtttggaggtgcggtggccgctgcggcgtcttctgggtggttcgtagtctgaaaaatcactgctgttcggagttgtgggacgtgtgtcgttggagcgacgctcgcgtcttgttgagtgacggttatcatatcgttttgtggctgattcggagctagaatagtcactgctgcttggtgtgatcgggcttgtttcgtgcgagcgacgttcacaccgattgtcgcaggagcagggtatttcctcaacctgcggaggggatccaacctcgcgtctgatagtatggcatcccccacagcatactatcttcacctcataaatagaggagtcagtgttggccggggatggggagcgtgtcctgtgggagtgaatcgcgcatgtgctgctgcaggtacaagatgccttttctggaatgggagatggcgatgggcatcgactgtgggcacaaggttccgtctcaggtccgtaacgaactagcctgattcgcccgcttcgagaaagtctcttgtccattggctcgccagcgaagtaccagccgaattctgtattgttgggtttggatcggccagtgaatctggaccgtctcatcttcttcgatcaaagacgacgagcactgggatagtggagacacaaaagagaaaatgatctttgttatgcaaaaaagcttatagttcatagaaacctgactggattgtcttggggcgaaagaaccgtaaagagggaattgccggagagggggatgccatttttatagagctttgataacatctgtgaagctccaagactgagctcatcatatcatagacattcattatgtcgttttgcgccgtctctatgttactcctaaagtgagcaaatctcagacagcattgtctggtgcagaatgaagcatcaaaggacaaacgggaacagtagatgtctacaaagggcgacacaatgatctagccctattgacaggcacaacagaggatgatattttgaatccaaccggatgtcagcccgaatcgaaagacataagaccgttgaacctttgcaagccagtgtatgtttgcccagcattgcagaggttgggtagaaagggatagcattagatgcatttcaacctcctctattgcatttgtgggacaactagactcctttgtattcctagacaaagcaccaaaccaatccctaactgtcaactgtttgaaaaacagctgaactccaatcaaaagaggagcgtggcttttgtggagaacacacgtctattcttttgtttccacgtctctctgtttgcgtcaagccacctaactgtatacgtacttgctagctatagtctttttgggttagggaaaattagcaatcaggcttcaaattcaccctaattgtctgaaaacaccatcatcgtctcaaacgtctcttttctttaatacacaggattgggcacaatggtgtagaacaaggtagaagatacattgggcagagtatgcagacacaatgttgtgcgtgtatcggatacctgcgcttggcggtatgtaatgatagctctacaaatacgctagcctcaccactcttagacggcaaatcacgcgaccgctagtaatctaataccatgtatttacaacaaggcacaaatattgccacggccaccgcttaatcatttttgctctaggaaacttcccaagcgaaatcgaaactcggtctctctctttctcgaccttgttagtctggcgctcgcatctctgcattacctctctcacagctctctacatcttcgattgactagctcctagctgtcatattccaactctacaccaattttccaatctcgtgtcttgcaacctatccgttcgcatcacacattctcttgcaagcccgccacaggtttcgcgataactatctcagaatcggtttttacgtgggggatcaacatccgaccatacaagcctctttaccacaatgcctacaccacttccatctagtttcgcttcggccgctgccggcaacacccaggaccccagccggaggggggatggttcgactagcggagaatggtacgcagccactgttttgccttttcaaaaactgctccattagctgttgctcaccaggctcggttcaatatcattgcttgatgctgtgaccatcaatgttttgagctcaagatatccgatgctaaccttcaatgcctactaggtcccgaaaccgcatgaatggagctacgcagaccttccgccgtccttctgttgctactactccctctcaccaccgggatagtagccagcctgcatctgcctcgacacccacggccggcggcgcgtacatccccccacacctgagctcaaatacttctagcattgcacggaatggggacgcccgatactccaaggatcaacttctagagctgtataaatcgcagcgggaggaggggaccttgagtaagaacgtggaggaatacttcgtggccgactgggatccccacaccgtgtcagctcctgtgaatggagcatgggggaagcgggatgaccacaagaacaactccgcagggcccgaggtttgctgggatcacggtggccaggtggagcccctgggaatcacgggtatgacggaggatgagagagaggtttgtgttgtgccatgcgttcgggtctgagtgagtggtcttgctaaaaagaattccgaatagatgttcgccgcttcagtcaactctcctctgaagccacccccaacaaacgccgcgaaggaaaacgttatcccagggaccggaggtcgcaagtcttcgatctcctaccctcagggccatatcaataactacgccacctcctccccaaccgccggtcgcccgggtccccgacgccgagaaacgggagaatcaatcggcaaccctatgtctcctaccggttccagctcccgatttttccgcgatgaggccaatacctctacccctccgccggccctactgcgccgcaaaactgatttccgagaatcaaacccgaaggtggatgagaaggccaaggatagcagggacgaccctgcctctccctttagctctttgaaacgcagctccacaaatccaatcaatacgggcgttggtggaccgaactctccctggggttcggcctcgcataatgccaatttctctccgatgggtgcctttggagctttctctcttggttccggctctggctctggcactcccacgaccgaaaagaaacccggatacggaagtctccgtggagaaagcagattcaaggggttgctgtccaaggatagctccgaagatattgccggttccgctaaggaaaagcccatgggcaaccttgaacgtcttgctgaaaatgacagtgatgcgcgttcgcagtcgccctggggagatgctgtcaagactcgcgccaaccgaagcgaaactaatccgttcgacgagcctcgcagtggcagcgctgctcttggtgggtctcaggatgttgaaggtcctcctcagtctgatctcgggtttggcgcattcggcatgacctcgagcattcccggattccgggagttgatgcaaagccaggagaactcgcggaacccaactcccagcctactccagggccacgagccaaatagtccaactaacactaatccttaccagagcccgcatggtgatcgtcatggtgaacgccaggaacccgaagatgtcgacactgacggatcggatattcagcctgcccagcatcccggaattagcggacttcgggatcattccaacccattcggcgcgatgagacgggctggctcagggatcgatcttcctactgtggaccgcagccagaactccagtgtcaacgccaaccgcactttctctggtctcggtggtctcggtggtctgtctaccctaggcggagcgtcaacttggtcatctggggctgctgtcggcactcccactcgtgagcgttctgcatttgttggtggtttcggtgaccccatatttggctctatgggcgatctccagtcccctagcttgtcaaccctaggtggaggtggtctatttagccctcacgccggtatgactggcactggaagcatcggccgatcaagcaaactcggtgccctcttctcttccatgcaggacgagcaaggaaggcccggctctgtgggcctagatggactcgacccttcgcaaggcgacaaggcaggtcaagcaagccaccatggctcaacgcctacttcgcaaacacccgtctcggccgttggctctattccaaaccttgctggtcatgacattccttcgagtcaaactcctggcgcaggcattcctgcttctcagcagcgtaccatggttatgccggataggatgcgttggatctaccgggatccgcaaggcaatatccagggcccgtggactgggcttgagatgcatgattggttcaaggcgggcttcttcagccctgacttgcaaatcaagaagctcgaggacaccgaatttgagcccttagctcagctagtgagacgcattgggaactcacgcgaacctttccttgtgcctcagattggccttcctcatggcccggaaccgacagttgcccagtggactaataccaccgccggatctgctcagcctcccttcccgggtagtttcccaagcttcggcaccaccttgacagccgagcagcaaaatgcgctcgaacgacgcaagcaggaagaacagtacctgatggctcgacagaaggaacacttagctcaacagcaggccattatgaagcagatggctcctcctggtgctccctcatcctcgctgaacccttcgctgcagcaccagtctagcgcacatagcctccaaagccagcctagcttctcaagcatcacttcacccgttggctaccagccatccccgatccaagctcccatgcaacagcagtctcaaggtatccctggattcttcgatggtgttgcaccgaggcagggcggtttgaacgtgggacccggaatgctgggaacggatttcggcaaccaggatcagctccctgctctacttgatcgcctgaatatcagccgccaggatccatttgcctttggcagtgctggttcattctctggccgccagcccgataactttttgcagtcccagcaggttactcaaatgcttcaggatcgtgctcagcttcaacaagagcaagaggactttgacaaggctcatgaagatgatccatttgatcagcacgctcgcgaggagcgtcttcgtcagttccatgccttgcgggcccaggaaggcgagatgggcatgcgcaccgctgaaggcctgcctacccaccctgccgccgcatctcggcaactcgaagcagaggttgcggccgagatggaggaggcagctcaacagttgaccgactctgttaccggcgctgagcctctcactctttctcagcaagtccacaaggctgcttctgcccaacgccagcagcaggaacatgaacatagccatggccctcctgaatcggtctggggaaacaaggttgaccacgctatgccccaacctttccctcccccaccctccgcgtcgcctctccctgcacctaccgcccagcgtaaccgccaaaacgtcgccgagtctctggctaccgggtcccgctcccagactcaaactcccgttgacgctgcacctacctccatcgcaccatgggccaaggaggcaaatgacttgcccaagggcccctctctcaaggagatccaggaagccgaggctcgtactgccgcccaacgcgaggaagtcgccgctgcggcacgccgtgcccaattcctcgcagagcaagagcgtctcagccaagcgcaggcacaggcagctcctgggctcccttcgtctgccaactgggctagcgctggatctccggccacccctgcctcggctgggtctccttgggccaacaagacccaaccaacacccacggcaactaccgctaagaagactctcgctcagatccagaaggaggaggaggcccgcaagaaccgcgcggctgctgccgccgccgccgccnnnnnnnnnnnnnnnnnnnnnnnnnnnnnnnnnnnnnnnnnnnnnnnnnnnnnnnnnnnnnnnnnnnnnnnnnnnnnnnnnnnnnnnnnnnnnnnnnnnnnnnnnnnnnnnnnnnnnnnnnnnnnnnnnnnnnnnnnnnnnnnnnnnnnnnnnnnnnnnnnnnnnnnnnnnnnnnnnnnnnnnnnnnnnnnnnnnnnnnnnnnnnnnnnnnnnnnnnnnnnnnnnnnnnnnnnnnnnnnnnnnnnnnnnnnnnnnnnnnnnnnnnnnnnnnnnnnnnnnnnngagcggaccgtcggtgctagtggcaaggtcaagggtgtgccaactgcgccagctcttggaccccgcacggctagcggaaccgtcccaatctcacctctcatcgctaagccccgccctgttaccactacccgtacggtgacaagcggcggcaccccccagtccaaccccaaccaggccgttgaggagttcactaagtgggctactctggctctgagcaaggggttgaacagcagcatcaatggtgagtttcgtcctgccaatttataccgtctccatactaacatcttatctctagtcgacgatttcgtccagcaattgcttttcctacccgctgaggctgagatcatctccgactctgtctacgccaattcccagactctggacggccgtcgcttctcggaggaattcatccgccgccgcaagcttgccgataagggcattgtcgaccccgtctcacccagtgctttcggtgagcagaagaacggcggtggctggagcgaggttgccaagaagggctctgctgctaccattgcggctgctgctcagcgtgaggaggaggctgccagctctgcgttcaaggttgtcgctccccgcaagaagggcaagcggtaagggtgtgcattagcttttctgttcaagctgttttttgagcctagatagctgagtcggatctgttgtttctatttatgtgagatacgtgcccatgtttgttgcgtgtcttcgccgtgtctagcatcatactcctagtagcattgatatcggttctgagttgtgcatctttttcggacgtacgtacagagataccttgtagcaatatccggagttagatactgcgtgcttattcagcaccgttccggtcgtgggaggtggtcaagtcgacgtgacctaacatccattgtcttctaatcgagtcaaaacatacgtgtcatagtctgagtcgatgaaatatcactggtttatattattcgtttcatcttgtatgtttcattgctgttttgctcgcatgatcgtttagtgctgctttcaatggcaccattcagttcaccagacagagttgaggtttcagggaagcacttgaatggagttttcttcgccaatattaggctgttttgtatattctgtggcatttctcgagtccaaattactgttttcagtctttcaataaatatcccttcaaatgaacatttcaccacatcatgtgctagttgaaaagtaagacagctgcagtgctctcttttagaattatgcagcccatatagagaggtatggtaccatacattggatggtttctttgtgatttagaaataaaaatatatagtcattgtgcctgtaactggagatatagctcttgaagatgtcttataagcccgatgacctatctgtatagactcaatactggctttgataggagagacgacgacaaagccctgaaccatttcgaaaaactgaaaatagattgcatgacgttaaataggtgcggcaggaactggctcaatagtgtcaaatataaatcataacaagcatagctgagttccacccctttatacacacgaaattgtcataaacagatcataaataagttaaaaaaaacatgtccagtgcaatggtcgccatttcacgcctacatacaggatctcataagtaaggatatgattgctttagactgggctctgcagtgcgactcgcctttgattgaagggtcccaacagcctcttgattcccatccagggtgtgttgattggactatcgattccagtatacaagaacaaatcgtagatccatcccccgaaggtgcaacctaatattggtgcaaccataggaatctgagaaagaaacacttgtaagccgagaaggcccggaaggttcaaagggttgacccaatgcccaaataaaacgtacccagaagtaataaccccccgcagcccatacttcgtgtccatacccaatcatataggatgtcagccgtggaccaaagtcccgtgccagatttatagcatatccagtctcccatccaaagcacgcgccaatgccaaagataacgaagaatagtgccagaggtatcaggggcccggcgcctagattgccgtcgtctttcaaagcgaacatcatgaacatcaagaccgcactggcaagaaactcggagaagaattgacccgtttttgtcataaattctgctggataggtgcaaaaaatgccgcctgttgctgtagtcgagtagccggggactgtgcggatatttggcccgccctcgtagacgttgatggctgacttatagttgccgtacacgatgacagaaccgcacatcgcgccgaagatctgggacagtgcgtacacggggaatttgcgccaggggaacccgcggaggacacagtttgcaaatgtcacagcgggattgatgtggcctcctgatgccccgctagtgtatactccgagcatgacgccgagtctggtgaatggcgttggttagaagggagtattgagtgatgatagaagaagaagaggcttacccccatccccaagagatagattggtagtcacccttttggccatgactgagtagcacctgagcaacgaccccgtccccaaataaaattaggatcgttgtcccaaagaattcagagaatgcatcacggaagtactccctcactttgaaccagagcagggggcgagtataagggctttcgacttcgcggttgatgtgatggatagccgtttcgttcttgtcagtcagacacagcgagccacagccactgtcatgacttgcaggggagagagtttcacggcggtcttttgccattggattaaccttaagctctttccaggtagccatcgaaaggagagcccaagctctaaaagccagggttgggccttcgaattgatatagtacgaccaaccggggggaatctcaccagccacgcaaaaatgatatggtagtccccccagtatatcaacggcgtagaatcagggacgaccgtgtaaccaaccctttgccctcaatctatcccgtacttcatagaagatgatggctcgattggctgatgcagggtcttgtcctagaagagagtgtgtatctgtgctgtcttgtcctcttggttccggctccagagccccagagggcgtgcaagcttacaggaaagatatcagctgaagtcaaacccgggatcaagtgcacgtatgctttttattaaacttgctgggccggccattctcctttttgttacggtgtctttttatctcacctagagcagaaatttctgacagcgcattttcgctcatagttcattccagggaccgtttgtaggaaaagccgtctggcataggaagccggaagtcaccgtccgatccggttgggctgtttcctctcttttgggtaatcattggacaccgcaatgttgtatatagttcccacttaccggtatgtgtcactgtaataactgcaggaagaagcttctccgtcttctgctactcatcttcaactcttcaggtgccggaactcatgtaggcccaatcgcaagtttctagaaagtccaaattgtgtcacctcgaggagccagacttctccaaagggaggcgagggtaacggaaagagattggtctttccccatgatgatgctgagggttgtattttttgcaatcttttctcgtcggcagtgacacagttgacagttaaccgtgtgatcatatgcttagaggtagcatcgccgagaccgggttgtccggtgtgatagaagtgatatcttgccctccagctgttaacaccgcagtattaactgcggtaaaatgaagcaaatatagacttgcagataaaatttcagttctgaccagtttagcaatcgcaatttgggccatttaccgacagaattctggttgtccttcaaataagaccgagtcaatgcgcgattcccgccgatttggatctgacacttcgtcaaatgaaccgagtcgtcaatcgtctgctgatctctctccaaaatatgcaggaaagtcatgctgacagggctttgggggaattcgggacgagcgagccgtttcctggtaaaataacttttccctaatgagtccaaagtgcattgacttggctaatttcacaatcccagttccaatgagcccaagaaagagtctagacgaatggtcaatacatgttgtagcacagccaattctcacctttaatcccacgcctggccagggataatcccaccaatctattctcacggtgtctccctgcattcctcgaatcggcaccccgccgtgtgactgtgaagctagtatgtacaaacgcttatatttatgtgtttgatgtttcttgctatatctcgagttctcccacgctttgttctttgtcatctcgtgtcatgcgtaaatagacgactcctttttttattcctcgtagattcctacacaacactccataaccatgcagccctcagatatatttgtgggttcaatcgatcaaggcaccacgagcaccagatttttgatcttcaaccgtgagggtgagccagtaacatcacatcaagtcgagttcagccaaatctacccgaatccggggtaagttgtagtccaacccaacaatcggatcaaaagcccagcctggacgcaaattaaccactactagaaggcatgaacacgacccattcgagatcataacttcagtagagacctgcatggaagaggcagtccagaagttcgaagcgcaaggtcacacccggagcagcatccaaagcatcggaataaccaaccagcgcgaaacaaccatagtctgggaccacgagactggcgagcctctgtacaatgccattgtatggacagatacacgctctcaggggattgtcgcggaattgaaacagaaaccagggcagagcagctccaagcactctgtggtctgccgttatcgacctactcgtcggctacaaagctaatctggatgttgagacatgtcccaagggtgaaggatgcatttgaccgcggtaccttggcgtttggtactgtcgatgcctggctggtataccatttgaacggtggcgtggctgccaacgtctttgtctcagattcgacaaacgcttcacggaccatgtttatgaacctggagacgttacggtatgatgaagtgcttctggacttttttgggatcagggggaatgtttatttgcctaggattgtgccctcgtctgatgcgacagcgtacggggctgttgcttctggggctttggcgcgggttccgattatgggctgtctgggggatcagtctgcggcgttggttgggcagaaagggttctcacctggaatggcgaagaatacgtatggcactgggtgctttcttttgtacaatgttggtgacaagctggtgttctcgaaacacgggttgctagctaccgtggcttaccactttggtggaaagcctgtatatgcgcttgagggcagcattgctgtcgctggatctgggatcaaatttttacagaataatttgaattttttccacgagtctaaagaggtcaatgaccttgcatactcggtggaagataatggcggatgtgtgtttgtcactgcgttcagtggacttttcgcaccttattggattgatgacgcgaaaggaaccatctgtgagtttctcattaccaggctgttatattatattaagtctgacagagtatgcagttggtatcacccagtacacccaaaagggccatgtcgcacgcgctaccttagaggcaacttgcttccagactaaagcaattctagacgcaatggagaaagacagcggccatacactctccgaactggctgtagatgggggtatgagtaactcagacctagcaatgcaggtaaatagcaaattctcttgcacgtgtgagtatttgaacaagaactaatctgattaaaatatagactcaagcagatgtgatatccatccccgtctaccgcccaaagatgcgtgagactacagctctcggtgcagccattgcagccggccttgctgttggactttggcacaactttgccgagctgcgagatatcaatcgttccggcggtacggtctttgagtcccaggtcccgcgacaagagagttctgctaagtttgcacaatgggaaagggctgtgcaaatgagtagaggctgggtgagatctgagagagccgagaaaggagaagccgctggcctgaaaaccgagacctacgcaccgatgaagaatcatgttctcccgcccaaggtagcacgaatctcagatagctccttaatctcacatgtggttaagagatctacatacactacgggtgtgaaagggagggcccatatctcggtcaaggagatcgacgtcccacctctacctgtgcagacggccctggggagtgtcttgggtgatttggatgatgcggacgaagaggatttgtttttggagctacggaaagtagagattttgcaaagactgaagaagctacggaagcgacagtcaaactgctactaattgtattcttattcctaatatggtcacgagtttattagatcacacatgaattaacataatgtacgaacaatatatacttcaacttgctacaaaatttcaaagcagaacatagattcggatctgagagatatcgcgctgtaattcaaagaatcaaccacagctcaagcaacacttgccttagcgatacgacactgtgcgcagcctattcaccctccttgaggaaaacgcaattcaactcggagccagggctaagtgtaacttcgaattgaagctctggattttcgactttattcttcccaccaaccggcagcgcaataatgcgctcataagcctgcaaaatccgaataacagtgtatcccatttcaatgatagcgaactgctgcccaatacaaatccgcggtcccccattaaacggaataaaatgccacggcctgggctgccagccggaaacccaccgttcaggaatccactccccgggattgaagtagttctccgatcccgggccgtcatatagatcagggtcccgctgcatcaacagcgtcgagtagatgacccgcgtgtttgcgcgcacacccacaggcgctagtccatccggcccaccgccacgtgggagcgtcgtatcgcgcagagagtggcgcacgttgaatggcacgacaggatataaacgcatggtctcgtgcagcactgcattgaggtacttcatttccttaagatcggtgtagctgggtttgtgggcggtggcgccgacgccaagtctgtcgcgaatctcgttgcgcagcttggcgaccacttctgggttgcgcgaaagctcgaagagacaaaaggatagtgtgccggctgttgtatcacgacctgcgaggagaatggcgacgagttggtcacggaggacgcggggatcgcgggtgaacctggctagggcgtcgagaaaggtctcgtgggttgaaagtttttcattaagttcgtcggctgaatgagcgaggacggtttggatgtatggctggatgaactcgtccatgatcttgaggtttttgcggaattcggtgcgtgacatggcgaaactaaagactctgttttgagattcagtgttagattaagctcagcgaggctccaatgacagacgatggtggcgtcgcacaggatcgagtatcactcacccgaaacggaagtactccgcttgacgctgttgaacatatttgaacgcttccgcaaaccgtgttgccggattatctagactgtctgtgccgttgccgagcaggtagtctgttgctgcatcgagggtgtatcggaagaagagtgacccgacgtccactaccttgctgctgctgggagagtcactaccgccgagaagtgggatgagtttctgaacatgtttctcgaagatttctgtgtcgacaatgcggtcacgcacaaacatgggacgaatgagctggcgggagcgagaccatagttccccgtctgtgataaagatgctgtcgccgaggaactccttccactcctgatggaaggactcacccttaccgtaatcagcgaactggcgggtgaggagtgccttgatattttctgggtccttggtgatgattgttcgggtggaaattccagcatcgagttcggccgtcttcacattttttaggccgcctgcttggctgatctttgcatcccagaattctataagaccgttgacttgattggcttggtagtcttggaacatgaagtcgagagcgtatgggagacggaactcaattttgggagctctgagaccgagacgggcgatttgtgctgaagcttggaatttgcggaatacgcagaatgcaacgaatagaccgagaagccatagcgaggcccgactgaatgtcgtcttctcaaggatgtcttcaatcatggtgccgctgaactggactgggctgagttgatgggtctgattttggtttgtgtcttcgaggggacacgttcagaataagagaaaaaagaactgatatgttgcataacatatgacagggacgaagtctattttatgaaggtgaacttgtcaaacagcgtggaccatacgggttgcaacgtttacgaatccgagaacacggccatcctctctttctagagaatataaatgaactcgtagtgtccaatgatgtatttttcctatatcccaaagaggtgtaggaggatggcccaaaggagcgatgcttgcgagccccgcgttatgtgacttcatgcttcgtttattgatccctattttgtctttgatattgccataagagaatgggctagacataaatccccaccaggtccattgtgatcccggttccatactgtataattatcgtagggacaccgacgaagatgccgtatgaagatacgactctcggtagacaagatttggcgacatagggagatcgacaacactttccaaggttgtggatatgtgggctgcagccacataaatatccctgcactgcataactaactatgttgtatgtgcacatgtccttcatgaaggcctaagtataagacgcctgatacgtcgggccttgagcattcgggctttaggctagagctatagaaagcctcgagacccctggctgtacaatatatatagaacatttggagtacggagtagttaagggaaaggagaccaatgatgtgcgtggttaaggggagctagtggacctattaagtcttcacgtgatctagtggattatcgctctttaactgttctctcacgggtacttgcctttagacaatttcccttctcggatgtcagttgaccgataagttctttgtctggatacttctcattgtgtatagaaaccatgaaacccattcacaacagctcaatggcttggtagtggaacaatggctattgtgaatatacaaactagtactagtgcatatgtagaactttagtacatagtcgcaaaatcaactccttatgtcttccgacagctcaaactttttcacctcttttatctgacccttcagataggattcaaaaataggagcaagggctcttctaactgataccaaatcgaccttgacggccctgtaggctgtggtacattgtactgccccacctcaccgctggccagccacagccacgtgatcaaacatccgttttggtcgcccgggtctttagcttcacttcaatctgcttgctaaagtcctgctttctctaccagaacctgttactggtctattaaactcacttgtgaccccaaccgctactacatcccgttttcatcgcatcttcattgttagtggcgccgataagatccgaaacgcctttatcgggtggcgcaagttcttttatcagcaaagctctctcttcgtgaatttctcaccaacctgtcacttttgcctaacttcacaatcgccttcgccatgatgcctcaaattgttctcgagacgcctcttgcgcaagcagtcgcaagcgtcatccagccgaaattggtggagatgggttggagtgatggccaagagtcaccactgatcgaatacatcgttctcatgctagtcaacggcaagaccgaggaacaaattgccactgaactttcaaaagatttccttggcctccaggaaggcgatactgcagccctcgagttttcgcaatggcttttcactcaagtcgagacgcttaaccaacaaattaatggggctgctccagcctcgaccgatgctaccatgggacagttgaacccctcggcaatggaattcgataactcagctcaaacgatgcccaatccgtttggagagaccaatggccaggatgccgagatgggcgaggccggaaacgagatgtgagtttttaccgtgcctttttgttaatgtttacaagatgctgacagtgctcctcaatagtcccacaggaccgaaagcgatgcgtaatggtagaggcggcaaaggaagaatgttgaaccaaatcaatcgaaacctggatcgtggctcggatgcagctctacatcgtgtgcgcggccaaggaaacgggcgcattggtcacaatggccggggtcaaatgagaggcgtcggccagcaaaatggtcgcggtggccgtgccatgggaatgccaggcggccccatgatgcagatgaccccggaaaaccagatgcagcttatgtcgatgttggaagaacaagcccggatgatgtctcaattcatgcctggcttcatgccacccgctgtaaaccctgcattccaaactggttcccacaatggctctcaaggtcgttcgctcttcaatcgggtcgaacgaggtggtcagcgtggaggaaagcgcagttacaacaagccgagagcggcagacggagcagacgtggatatggacagcacagcgggtggtgaacaagatgaaagcaaccccgacaatgtttgtcgcttcaaccaacgatgctcgcgccaggattgcccgttcgcccatcaatcacctgccgctcccgaaggtacttcaatcgatccttctgatacttgctcattcggtgcagcttgcaagaacaagaaatgcaccggacgccacccttcaccagcagtgcgatctgctcaccaggcagaggccatgtgtcggttcttccctcactgcaccaacccaacttgtcacttcaagcacccgagtatgccagtctgccgcaatggagccgactgcaagaccgaaggatgcaagtttacacatgtcgagaccgcctgcaagttcaatccctgcctgaacccgaagtgcacctacaagcacgccgagggtcagcgcggtgcttacgctgacaaggtgtggactccgcgctctgcagagcatgtcagcgagcgcaagtttgttacggatttggatggaccgcaagagttgatcaagccggagaccgaggagaacactcagagtcaggagctgaccgcgtgactccgcctgacatgacacccaatgaatgaagaaaaatcactgttcaaaaaccgaaaccaaaaaaaaaaaatagcacacatcccacaacagtctgtttccgaagcgaagaataccatgtacaacccgatcttgatcaacgaacgaggaatggctggagcgaagggcgttgatactctttatgcatttgcttttgtttcagatactattttctgtcctgttcatagattccccctctaaaagaataataccgaagcgaagacaaattcgcgaatgtctcatgaaccattgtgcgagctcgtaggattgttggaaaaagtgagctggagggctcttggttagttagggctcccgaggtccccgcgtagcttaagtaagaacggaagcttccgaggaccttcgggtttagcttcaattatccaaccaactgcgaaccgaatcttgccccgatcagcagatatgcggctaccatgtgtctctagagcactgagaccaagaccaaggcaattgactcatctcctcaatggtcaaaaatgcacatactcagccgtcgtgcttggcggtggcatcacaggactcacagccgcctggcaactcgcgcaagaccccatatgcaaatcgatcaccttgttcgagaaaacagaccggcttggtggttggatcgattctgaaacagttcctgtcgatggtggcaatgtcgtgttcgagtatgggccgcggactttaaggagctcgctcccagggtcactccctctgctttacctggtgagtattgctcgcgtgtgcatgctccgaattgcagtgccttgatatgctgaccccactgaaaggcgacaaatctaggcttgtacaaagacctcattgttacccctaacacgagccccgcggcccagaatcgctatatttactacccggaccgtctcgttcgtatgccggcgccgaagcctgaactttcttttgcggagaacttcgacagctttgtgaatactatgatggagccgctatttaacaaatttctttcagggatagtgaaggatgtcttcactccaccccgccacccaactgaatgggcggaagatgagtctgttgcggacttcatcggacgtcgttttggccccaaagttgcagataatatagtctccgctgtgtaccatgggatttatgctggtgatatcgatcaattgagtgctcaaacactgttggggagcgtccgcaaccttgagggaggtattgggggcatcggtgggttagtttctgggggagttacggcctctctcatctccaggtcgctctccaaaacgaaaactcggaatatggaagactttatggctatagacgccatttctgcaggccctgaattagtgcgccgtcagcatgatttagaggtcctcgcagctggagctagtactttcacctttaagaggggagttggccagcttactgaagcactggtcgcttcattgaaagcatccggcaaagtccgcttccaaatgaacaaggaaatcacaggtttgcgtgcattggcacgtgctcctgcgattgcggtatgtgaattattctgccttgctatgctatacccctaagcccccaaagccctgaaactgatgctgactgtcaatagatggaattctggtcagacaggcacagccaagtcaagacctttgagtatgactatgtcatctccaccattcctccagttgcacttgcgaagaccatgcggaaaaccgagcagttagaagccaagctgtaccctgtcggcttgaccccattactgctacgaagacaggactatgctgtgaccgtattagtcgtcaatctgtattacccaaatcccaaccttctacccgtggaggatggctttggatacctcataccgcgttcgattccctacgaacagaacccagaatgtggacttggcgtcatcttcgcctcgtcctctagtgtagggaacgggacagatccttcatcatctgaagtcaaccaagattccgcacctggaacgaaaatcaccgtcatgcttggtggacattactgggatggcttcgaagagtatccagaccacgacaccgcagtgaaaatggctcgcgacatgctcaagagacacatgaatatcactgataccccgactgttacacggagccgtctccagaaggatgctattccccagtacacagtcggccatctggatcgcatgtataagctctcggacacagttcgtaaagattaccagaagcggcttattctcgctggaaattggtataatggcgtgagtgtgggcgactgtgtcaagcagggtatcttatctgccacctacggcatcggaagaaaccggctcaactacgagcccagtccatggcgtccgtggacttcgtttgattataaacgctggaaacttgagggtggcattgtgatgtctcctgtccgtcttgttgactccaaaatctgatgctttgtgactagtccaagtggctttgctacttatacttggaaatgtacaccagagaaggccaaagcgatgtatagtaaatgtatcaatgaaacaatatatttctcgttgagagttggaaatcgacggcattggccggatatcaaatgttcaatttctaatgtctaatcactgccagctcatggtcggttaacctaaggctaaaagttgatccatttgtgaagtctgttaccatcctcggtcctgatcctaaatcagggtcaagggcaagagcacccatactcccgatcgagggaatggcagagagatgtgacagcatccgaaatctcccacagacgaagcgatgggtgattggaaggctgaacccagttctaatgtcccctgccatataggtagcgattctcacccacctacttccaaccacttgccacaatgatgcaggatagtttggtggctcccggggtgcttgcaggaagccctggtgaatgatatgcacattgacatatactcgacacatggatatgaaatattgaatctgatcttaccccgcgtctcagggttcgaaaaggcattcaggcattcccattgctgtcactaatcttcttgtcaccattggaatcaaagcccaatacatccagctgccggacaagttcttgaattttgatgactttctccaactgctcgggcaacagcgcctctcccagctgcttcttatcgcgaagatcccgcgcctggcgtagtttcttcttcagactgcgagctttcttctccttctcagcttcgagatcaatcggctcttcagcaggcttatcttctttaggtgcgggtgcggggacacgccagttgttcgactccgcgcccttgccctcagcggtgggcccggcttcgtcggtttccttcgcattccgcttggcctcgcggcgtttagcgttcttgttgctggcggcagtggtggcggcgactgccggtttcgctgcggtcctggtcttgtcgtcttcgctgctcaatgcttccgctcccggcaccccgccttttccgcgggttttccatgctgccgctgcccggtttttgtatagttcgacatcctcggggggcttgtagccggggcgcacgcggatctccttgcgtttagaaccgtcggcacggactgacgagggaatgtatcgttcgccggtctgggcatcggtggtgatgccggacctggcgacgttggaggccatggtgcggtttgtagggttgaactaatgaactagtaaaatatgagatgtccgatagcaccttgacagagtcaagctccaaggcaaagatcagtatccttgaagatccaaagagaaaaacaacgcgaacattgaaagttgagtgcggaaggccggaggctcggccaatcagcggaccggcaattcccgcagattcaaccttcgcaacttcaacctcacaacttcaactctcgctgcctcatactcctcttgaatcctttaatttaggtcgtgtgaaaacaccccaatctctcacaatggctggtgtatgtctatactccctcttccattgctcctatttgcattactacgtccagtactaattgacctctcgcatgacagttcgcaaacgttatctactcgcatgtctccctttcctaggtcctacgatcgcaactgaaacggtccaattgaaatctaaccgacgcattatttgctctgtttaggaccttcattcgcaagaacactgttctgctgaccactgcttttgccggtgccttcgcttttgagctgtgggttacatccaatcctcgagcatgttagatatgctgtacagcttaatacagaaaactaaccatgcaatgtcaaaacagtaccttcgacatcgcctccaacaaagtctgggacacctggaaccacggcgtatgtgaacctctttcccgatggaccgtctacaatacccgaggcgaggacccaagctgactatttctctcactttatagcgccaatggaaggacatcaagcaccgttatatggttaaggaggaggaagatgacgagtaaatggactcgaaggtgattgggtactttaccgcgggtaaaggggcatggaaaagccagtgaagctcgtgcctgttgtttctcatcccatatgtgggcttgtacgtgatagttggaaatctgtattttgactctcaatccctggttatacgtagaaaggccctctatggtttacacgttttatcgccttggtgtatcgtacatattagagtctacataccccatgctgttatttatcatccttgatggttataacaccaagaagaaagagatatataaatagatttcaaaagagatctaccaagacatctagaaagacattgaaatgttcttacatataacgttcctaggtaaggtcatcttcgaccaaatagatcagattgataaaagtttacatccttaagtacagaggccacagaagcagccaactgctctctcctttataccttcaagtcttcaaaccgtggcgtgtttttctgtacatatgtggtgataaggccgtagcgtggctgtggcgtttactgacggaccggttccatcgatgtcatagcgaaaaatgttaccttccggtctctacaaacaactctcaaattgatttcttcttgtatatttttggcctgttggaccttgagctttgtattcaaatttcaaacgcgtatatgacttcaccgtatctgtgctcatctgttcgcctgcattggtccacttcacccgttgctctcaccttccccccaccacaaagtatcatcgtgtgagcaacgtgaaccacacttgagaaccatatcgactcaatccggaccgatcccttgaatcctcacttgagaatttttttcccgcctgcatagccgcgaagaaaccacctgcgtcgcaccattaccacctcgagcgcattgtcgcgacaacggcgctctcccatcacttccttgtgatagcctgcgcgaccgctacggcaagcaagccacaacaacaaatcatgctcatgctcggggaatgtgagaagctgctcggtgatggtcttctccgtttacccaagaaacacaacttccgctatggccccgctgccgagaaggacctgctagagcttctcttccgatcgcttgtcggacacaacacagaactaatacaacacttgttcccagagggaactccggccggaccatggaaactagcggaggctcaaggtgcccgggaaggagctgagtacagtgaggcagcacggggcaagcgctgcggtcatatcttccgtgctggggaagccacataccgatgcgtgacatgtgccgcagatgatacgtgcgtgttgtgtagtcgatgcttcgattcctcggatcacactgggcatcaatatcagatttcgctttcctccggaaactgtggctgctgtgattgtggtgatgacgaagcatggcgccttccgctattttgcgccattcataccgatagtggtaataccaagggaaaggaacgggcgcagcgggcattgccttcggagcttgtcgcttcaattcgcttgactatatcccgtgtgttcgactacttctgtgatgttatctcttgctccccggagcaattgcggctgccaaagactgtcgagggcattaggcaggatgaggaggcctctagattgcgtccggactggtatggcgctggtgatgaagaggaggaagaacctgaatttgcggtcatgctgtggaatgacgagaagcatacaattcgcgatgtctctcaccaggtcacacgtgcttgccgtgaacgagatagcttcggccttgcacgggctcatgaaacgaacgatatgggccgcagtgtcataaagtattcgagggacctaaacagactcttaggggtttctaagataatcgaggagatcaaggttaccgtcacggtgcgctctgcgcgggatacttttcgcgagcaaatgtgcacaacaatagtcgagtggttggctgatattgctggctgcgaaatcctcgaggacaatgagattttcagacaaaccatctgcgaggaaatgcttatgccttggaaaaagggcagtgggggatataacgaagatatcggcatgaagggcattgacgatcatcagcggactgagaaccttccaggtcgcacgctgatgattaatttgcctaatcatggccaggtcctcttgaccgccgacgaagacgaagacgaagacgaagacgatatgcttgatgacgatgctatagacgaagatgaagacgaagactatgtcgaggcccacgatgctgatgatgaagatgacgacgagatggacatcgaactttctcgtgatcgggaagaagatgaagatatgatcttagcaggtgcagatgaggaacttgctctagcagagcgcattctcgccggactcactggcacccagccaccaccccgaccagcactgaatcaaaccgcagatcggtcctctaccgaacgaggcccgtccgcatctcaaagtcctggccctgaatccgcccctacaggttatatccccattcccaagactcctggttcgtaccgacaaaggccttcgaacacggatagtcactggcaagtccggccgcccattcccgccccgggcgaagaagtacctccgtatgaagacttgtggcagcgtactcgcctagactggctggtgctgtatgatttgaggctgtggaagaagacacgaacagacttgcgtgatctctacatcagcactgttgtcaatgttcctcagttcaagcgcattatgggtcttcgtttgtctgcgttgtacacggctctggctcaactgtacctcatcgcggatcgagaaccggaccactcgattgtcaacctttcattgcaacttctcacgaccccgtccatcactgaagaaattgtcgtgcgaggcaacttcctcacgaaggtgatgtctattctctacaccttcttaaccacgagacaagttggcgaaccacaatccgtcgaccccaacgccaccctggcgtttgatgccggctcagttacaaatagacgtctctaccacttcttccttgacctgcgataccttctccaatctgaatacgtacagcatcgtgtgcggaccgaggaacaataccttcctcaattccttgaccttgtcaagctgtcacagggtatttgccccaatgtccgcgctgttggtgaacacgttgaatatgaaacggatgcttggatcagtgcgtcaattctcatgcgggaaatcaaccgactttgccgccaattctgcgagtctttccgcgaccctgaaattgacaacgatgacaaccttctgagggcaattgagaccaccgccactacagcgattatccattcggctggtgtagaacgcaagcggttcgaccaggcagaaataaaagatgaattaagattcaagctactgccaccttttgactttgaggtcggcacctctggtcaagtgccctgccatcgggtggttgaattcgtggtggaacgtggatctatcagtttccaccatgccctccactacacattgtcgtggcttattgaatgcggacgagatataagtagcgagactatgcgtggcgtgctctttgacgctgccaatgcggcgaggagtgagattcatgccgctcggactgctaaccctagtagtatcgatgatatcttgcttgcccttgggcccgaggacttgctcctggctatgtttgactatccacttcgagtttgcgcttggctggcgcagatgaaggctggcatgtgggttcgaaatggtctcagtcttcggcatcagatgtcgcagtaccgtggagtctcttctcgtgattttgcatactacagagatatcttccttctccagactgccttagtcacatgtgattctagcagagttcttgcttctatagcacaccgctttggtatggttgagtggatggctcgaaattacatgccccgtcctggatacgaagatacccagattgtggacgtggcagaggaatttgttcatctactggtgattctcctgacggaccgaacatctctgactgccatagatgacagcattcatctcacccacgaaaacatcaaacgtgacatcgctcatgttttatgcttcaagccgctgtctttctctgacctctcgacccgccttagtgacaagcttctggactcagacatgttccaagatgtgttggaagacgtcgccaacttccgcccgcccgagggcttaagtgactctggtacttttgaattgaagcccgaatatctcgatcttattgatccatatagcgcacactatacaaagaaccaaagagacgaagcagagaatatctacaaggaatggatggcgaaaaagacaggaaagaatgcatctgacattgttttcgagccaaaacttcgacccatcagctctggcgtgttcttagatcttcctcgattcgccggaacaatgctgtttgcacagattgttcatcaatgtttggaatacgttatctctgcaaaagagtgtacaccaaccatcccatcgacgcgcgttgagacattccttcaagtgattctgcatcttgtccttgcagcggtattggaggatgattccgaggaaactgatatggtagaagaccattccaactcattcaactggaatgctttgtcaaagacccgagagatcaaggctggccacttgaccattgtcggtttattggaaagaatttccgtcacgagtgaattcactgcatctggccctaaaatccgacacatactcaaacgtctgtggcaaaagcgccctcgcacatattcatcggcaactgcgtctctcaaatttcccttcgaccggattgacaccaattctcctgcaattgatgcagataacgacaaggagatcaagaagaagcaagcgctagagaggcaagccaaggtgatggcgcagttccagcagcaacagcaacaattcttgaatagtcagggtaacatagattggggcgaagaagatttcagcgatctcgagtccgatgcagacgcaaccccagaaaagaagctatggaaataccctagcggaacatgtatcttgtgccaggaagagaccagcgattcgaggctctacggtacatttgccttggttcaagatagcacgattttgcgacagaccgatatcagggactccgatagaattcgcgaggtgctcagaacaccaacaagtttggacaggtctgctgaagaagtgcgaccattcggtgtatccggagagaaccatactaccatcaggcgtcttgactcttctggtggtgaagtcattagtgaaaagattggactgagtaaagggttcaacgcgaagagcactattcgtgggcctgtgactactggctgtgggcatataatgcattactcctgttttgagcagtacttcttggcgacacagcggcgacacacccagcaaattgcgcgtcatcatcccgagcacactaatctcaaggaatttgtttgtcctctttgcaaagctcttggaaatgcattcctcccaatcacctggaagggcaaagaagagtctccccttgttccattcagtccgtccgaatcattcgaccagtggattcaattaggcctcaagcatgccttgaaccaacagcaaaacctcacaatcctcatgcagaaggagaagatttatcctcaaccgtatactgacatctttatcgactacttgtctaagaccctggttcctccgcttgccaataatattgatcaactgagggcttcgtatttcccagcaactgcctctgcacaatacgtcacgccagcacgcatgccaatgccaggtgttttccctcccaccgaagacctctccccttccagcccacttcagcaggtgtcgagtccctcggacagccctatttcggaactgcttcagagctacaggcggcttaagaagacactcacaacaaaccatgtcaattcgatgttcaacaacactcctgaggcgaataacaatgacgatcttgtacatactgattctctaattcggagctttggtttcagcattgctgcagtcgagatcgcgcagcgtggtgtcgagtcagagcccggctcgaccttgctggacacaattccttcgctgacgcttacccatctgcgcgttctatccgagacagtgttgacgtatgctgccgttgggtgtcttaactcgtcgggaccatcaaaaagccatccaacaaatgaattccaggagatgcatcgccaaaagatttgccagctacttgtcgggcacccttgtttgaatggcacagctttgcttaatgatgtccgtaacatcgagcctctgctagctgtggacaccttcgtgttcttcgcagagtcatccttgtctctgctcccagtcctcgatattgatatcagacatcttgtgcgaatgtgcttcgtggctgagattgtgaaggtcgccgtcactttcattctttggccactgggattaaaggaggaactcgccacccaccccgaggacaatactatggctgctggtatatcggaagaacaattcagagtgaccaagcagttcttcgactcggtcgttactgaactgaaggcgaactctgtcggccgtgctgaaggctcatccttccccgctgagagtggctacgtcaaagatggagaggaaactgccaccccaggcatcattacggccgtccggcgacttgtgacgagctacggactagcattcctgcgcaaggcagttattcttcttcatgttcagcatggtgtcgagtttcccaacacaggtttcgccgacgtggagtcctctgagcttgagcgcctggccaaagcactccaactgccttcccttgatgagattctcatgtctgtcaagcccgcacgcaatacaaacagccccttcgatgcagtcatctcaggatggatcttccactggaacgcttcgcgctcaggcattcgcttcgaagaccaccgtctctggcccagtctgtcgcaccctgctatcttcgagcttgttggccttcctaagtacttcgatagcctgatcgaagaggcaaatcgtcgtcggtgccccaattctaagaaggagctcactgatcctagtatctgtttattctgcggagaaatattttgctcacaggcagtctgctgcatggtgaacaagcttggcggctgcaaccaacatcttcaaaagtaatcatacccgtcccactttgtttgtgagtactttccagctaaccagtcttccacaatagatgcggcaaaaacgttggtctttttatcaatattcgcaaatgcacggttctctacttgcacaacacgaacggatcctggcattacgcgccctacctcgaccgccacggcgaggttgaccccggtctccgccataaccgccagcttatcctcaaccagaagcgatacgaccggctactacgcgatgtatggctgtcacactcgattcctgcgactatcagccgcaagctagagtccgagattaacaccggaggctgggagactatttaatgagcataaaaatggggttttttctgcgattgctgatatgcgtgcgtttagattccttacctgcttacttttgatgttcgatggcgaatttgaaacgacggtgattgtgtgtttaaccgatttcttttcttttcttttctttttcactgtatatctgaaattcttctcatcaataggttcccttggtagttatgatttaaaaaataccaggctatgttcaactcaaatttcggttggatttgaatatagtaataccggttccatcgacacaggtaaaaaggtcgttgttttgctgcatatattccctgttataccccttctaatgagtcctcgacactcgcatttcctttctcgcttccccctcccccccgtaaatgactcctacgcatagcttctagttgagggagatgacgtttcttagatatatatatgtctattttgtctttcttctgcataaatatgtgtgcataattggctgtgagaatatattgatgcacaacaggctttctaactatatcctggatgcctgtcatcatcaatctagctcacttgtcgtataggattctaaatgtctaaatcaggattgactaactgagcgaatgccatcgctgctcctagaggactccgactagtgacatttagcagcgccatattgctcagcacgtttctttgaagggactagttgtgacaatgcttccaagactgacagtgcgccaaacgaggccaaacgcccgcccatattcacacatagttggcagtgtcacttagcagggaaatactatgaagtaaaaatacttacctaaattacctgcataactaatgaaaatgccctgagaacctcggaaagcttgaaaggttggccgatagtcttatcagtgccaagccggatctccacctcttaacatgagcctttctcaacttcattgcaacttgagctcgagaaacatgaataacgagcagtttcgccggctactagccgaccagtcatcatcaaaacctaaaccccagagcccaacgcctggtcgtgatgcatcgcgtggcggcgcaaccccgggcgggtcactggggtcgcgaatgcggtccagcattcccatgaccccgtatgtcgtttactttacagattgctatgattgcggaggaagctaacagctggaaatactacaggcgttcagtcactggtgtggactttgcccgtcagctcttcgaccaacgccgcgagggcgaccgaccttctaaacggttcaagtcctccgccgcgccgaagggtacctcgctaccgaccggatatcaggatcgtgcgaaattgcgcaatgcagaggacgaaggtcagagcaacacgggtctggaggcgcgcatcaaggcactagaggatatggttaagttgggacaaatcgaccaggctaccttcgacaaactacgtcgagaccttggagtcggaggtgacattgaaagcacacacatggtcaaaggactggatatggatttattgaaaaggatcagagctggcgaggacgtgtcacaagcggccgagaaacctgcgccgcctcccgaaaaagaagacgtagatgaggaactcgatcgtttgatggaagagcagggagctgagaagcttgctgctgcacccaagcaacagaaagaaaagaagaagggaattatggcaccgccaccagctaggcccaagacccgcgatgaaatcctacgggaaatgaaggcaagccgtgctgctgctgccacgcctcccccgccaccggagtccatactcggctcgaaattcaagaaactgggcgatagaaagcccgagaagaagcgctttgtggagcatgatgagaccggccgtcgacgcgaagtgcttctcatcaccgatgcgcaaggaaacaccaagaggaagactaggtggcttgataagccgaccgaagtgcctgtacctactgagggggagctcatgatgcccgataaaagtctcaaacctctcggcatggaaattccagctgatattgccgcccgtgccgctgcacaagtcacacccgaggatgaggacgacgacatttttgccggtgtcggtgatgattacaatcctctcgctggactcgaagacgattcatcgtctgatgaagacgatgaagtggcagattcggctactcgcaaacccgaaaagggttctgtgggtgaagaggagaaggaacctgccgcgtctaaaacagcacttgcaaagcccaagaattactttgcgactgggacttcgactacaacagaagaggagcctatcgaccgttccaaccccctcaccaaagatccaaccattcttgcagccctcagacgagctgcagccctccggcagagctctccctcggcagagggcgaagcagacgggtctgatacagcgcttcgtcacaagcgtttcattgaagaggcacaccgtcgagacgctatggatgctgcagatatggatatgggattcggaggaagccgcaacgaagacggagcggaggaggacgatggtcccctgctcgactttgacgacgacgagcgaggcgggaaaaagagaaagcgtggccccaagaagaagaagggcgacaaagatagcgtcatagatgttatgcgtgttgtcgagagtcgcaagaaggaggcttcatgagtgtcattgctgcggatgccaggacatgggctctcccttgtctcctacatgtactttatactatgaaatcgacatttgaagctatttgataccctgctatgccatgccttttttacttagatactagaagtcatcttatcatgaaggccactcagtcacctccggcgtttacaaatcgttgtattaacccctttctaaacgctgttggatatcatccttagatgcaatcaaggcgatattcactctacatatctatataaaagtggtcagctgcttatctggccttagccttcaacgacgtaggttggtagggatggcattgggtagagacagtagagacatcttgctaacaaaatacctcgatgtcttttccagtacatatctcgttctgaaatattgtctataatggtcccgtgaaaacctgcgtcactatgtaataagtactgcgtgtatgggttaacgtattccgtcgatatcttcggcatcggacgtgtgccagccaccactaggttaatgcgtctatatgatctgggatttcggcttcgtcgtgtctcgcttgcccacaggacaagatagaatcagttctcccattgggagatacttgatcctttagactaagtcttggaattcgtcgtcacatcttcccaaacaggtcacctggggcatgttaacagggtggtgctttccctatttgagaatcctactttccctaaaacagaaggaccccagcttcagtccccagtttctgggtataaataccctcccctcccccccatctctcccatttttttcttttctcctacatccatcttccatccatcttctactccccccctggggtttggacgtttgttcatcactcaacttcataaccatcttttcaccatcactctcttttcttctgcgtctctgccacatcttgctgacccccagatgtctcgccacctggaccatgttgactggtgagttcctccttattatttgttccttcttatttgttccttccacatgttccttccacttgtatggcttgtcatacccgaggggtttcgcgtctcgcgttgtttatttctcttccctctttcccttttttatccatctctaccactccgtgatttcgtgtcatcggcttgtgtggttcaatgacttcatagaatcttggcatcatgtatgcctcctaaataactcatcatttatctaatatcgactctgattgatgtgttatttctgctcatgggacgaacgacctcacggtaatcatgcttcaggtgagaactccagcgttatatcaaccccacggttctttgctcgcaatgagtggaagacctcaccagtccattggctgacgcagggaaacttcttcttcctctgcctttatagattactgcatttttcgccgcctttgccgtatccagtttgcccacagcctatgacacaccatcgcggtcaacaccaaatataaaggccaatcttccatccgcaaactctacatccaggtgaggtctcctagcggacacaaatggaaaggaggttgaacgcacccgcaccagcctccgtagatagttagatgagattctgcgatgggatctcaccagcatttgctgacgcttgttggttttttaccaggcacctctatatccacagttaagttacgaaaatcgctatcagagctacttgatccttccgagcgtctcgatctcagctgtcgcccagcccagcaatgtctgccaattttagcgcggacaagtgaatctccagcgcggtatactccacactgcatattcaggtgaggttcctaagcggacaaaaagggaaaggaggttgagcacagacaccaaaggcaacctccatagatagttagatagggttctgcgatgggatctcaccagcatttgctgacgcttgttagtgtctcaccaggtacctcgatatcatcagcaaactcgaaaaagcctgccagcccacttcaacttcctgcatagagctggttcgtcttttatccaatcgactgggcgactcccaaatatgagcatgagtccactctaggttgttcccacgttgcctatctcatcatgcaacaagcatgcacatgatatttgctccaatgtgcattttgaggtgaggtctcccagcggatacaaatggaaatgagattgaatgcaaaacgccaacctccaaagatagttagattgagttcagcgatgggatctcaccagctttgctaacgcttgttcgacaggaatattaccagcccagatatgcaagacctgccaactcatttcagactgctatcgcgcgctgcgtcgctcgtaattgagcaaacacgcaaaaatattcgctttgatctgcgttttcaggtgagatctcccagcagacacaaacggaaaggaggttgaatgcaaccgcaccggcctccatagatagtcagatagagttctgcgatgggatctcaccagcatttgctgacgcttgttagtcttaactaggcatccccatatccgcgtcattcattcgggcttacttgcgactcaatgctcttcatcgatatttaggtaaggtccctgagcggaaaacatatggaaaggaggttgaatacaaacgggcaacctccaaaaccaaccttcttaattagctagaaagcgttttgcgatgatgggccttaccagcttttgctgatgcttgttggttttaaggtccataacttgaacttgcttaccactcggcggcctgtcaacacgacaatctgatttatcttgatcaagtaagattataaactgcaccttcgaagtcgtacagttggctgactactaccatatctgtttttgattgactcttccaactcattcggtgctcgaccagacaaaagcgttgagtctttccggctttatacgtgtcgtgctgctgggctacaatgctctagtggcgaatatttcttattattatttcaactagacgaagaccacagccagcatcgggaaaaagcaatagcagcagtgtctccattgcaatatacacggctaacatcactcagatcaggctttcagtcggctattcatctgagcaatgtcaatacagggcgacaaggtaatttgaaaccccctataggtcaacgagcgaattgtggaatatggtgaatggcctactggcaacattaaagttacaaaagtggagattcaatgtgaataaatcgatattgaacatcatacaacaaattgacttgaccttcaagaactaaacctgtaccaaaaaaggcagttagagatactcctattgacggcagatttgaggaagagagaaagtagcaatccactctgtagtccacggatttcaagtgaacaacaaaaagcaacatagagccgctatgggtgatctcgcacacgctctcagccatagggataaatgatttcactttcaggagattctcgctgccttcattcgtcttatttcagtcaacttcatatttacctaggtatctgggcattggattgctgttttcataactccagtttttattttctccccttatcccgacaacattatcagatcaacaccaattaatgcccctttcccacctgtgaacatcctcagcgaaaagcatggtaccgtggagtaagaagaaagaagaccaacgtgatagttagaccaatgaaataggcactccagcagattgcattcccgtcaaataccaggtatcgtataaccgactagctcacgaacaggacaacactttattctatatccccacatatatagaaaggctctccgtcgagagaatggatggagcttataacaccaccagcagtattgccaacgagcattctgcagttgacgaaccaaacgtaattccgaaactggttcacgccataggagctcagtaacccctgttttacgcactcgaagaaatgactggtaacacgtcaagagatatctgcaagttatcgcgaggcaaacttggtccgtgacccagaggaatgtaaagaggatttccactatttctggtggaatcctttggaaattgtcgactagtgggggtttctgctgggtcttctgttgatgggtggttcgtcgatgtcgttggaatatggatctcatctttgtgagtgggcgtgtatgattgtgcatattggaatatagcgaaatggtgagtgaaatggaaaatgaaattgacttcggtctcttttacgttgataggcgtcatcaactggaatagtacccatgggtttctaccagcttagggctatagtgctgttcatcctccttctcatttctctctattttcttttctgttactttctgactgctgaaacaatggatttagccgtcgttcagcactactttgcctttattagcatcacagtttcgactagagcctacgaatgatggcactatgcaaataaggtaagccaaccagtatctaggattagctgatccccaacggattgaccttagaaacgcttcaaaggcaaaccccacgaaagacaaatgtcaagatgcaaagttcaagcctctttgtctcaaacgaggccttaagggtgcacttgtgatgttaccaagggcaaatactgaagaatatgagacatctcatccatttgatatcaaaattccctttcttcgctcctctttcatcaccaccgaaaatcatttttgatcaaaaataagaattgcagagcatgaccagccatcaattgccgttgtttttgatcaaatattgagaatacttacttgctaagaggaaatttcacgtgggtttgatgttgaagcattgaatattctccctagtgtggtgtatctcagcgatggccaagagagatataaattctcacgtagttgacacaaggttgtgggtcctggtccgtgcgcatcccgacgtcccaacctgacttccgatctcgggacttccgacttatccagagaccattttggcgactgaatcgagcgaacatttgttctcatgctgataacacatccgtggagatacaggggaatcatggcggagaccgcgggtttatcaagacatcagcctcgcaaaccacgcccagaagagcggcaaaagcggccgcaattgacacatttcctgtgtctccctctggtaaacaccaagtcgctgctgcagctggaatcatcactcggggccttcataacagcccatgtcgatgaatctgggccagcttctcaatcgtcccccaagggccaaagggatacatcgcgcctgagtcttccaaggacagcttttcgtccactgggcacacttcaccttactcttggtgtgatgagtctcgccaataaagagagacttgatcaagctcttgcttttttcaaatccctcgacctggcagacctaatgagcgaagtaacgcgagccgccgctcactcacaacataaagacgcccttcaccaatcatcgcccttgacggtttccctcgagtcattacatgctttgcctcaaggaaaatcagcaaccgtattgcatgcttctccagtagatcatacaggccgtttgcttccattttgcgtaaagctacgtgacaaattcatcgaggctggcttcatccaaagtgagcccgacagaagatcggcaggaagacataaccccaccaatcgctccgtccaagacagccctcaggcctctgggtcagctaccttctctagtgacgtatctttacgccagctagaaagccaaacttcctctggtcccgcagacgtgtgcgaaagccggaacccattcataaatgtaataacacgaaaaccgaaacagcgaccacttcttctgcacgcgactcttgtcaataccatttatgtccgcggccggcagggtcagaacaagggtgcgaaaggaaaccgtccacccaaacgccttacatttgatgcccgcaatctgatctcacaatatcgtaattactaccctgatgacaatccaaatatcccacaaccagcacgtactggatcttccgaagacaaaagtgacccctatcgtacgaaatcttcaccgatccccgacagaaacattgtttcctccgagcataaaagccattcggccacttctcccccaccgtcgcggggctctcctttcatttgggcaaaggaaattcctctggataccatctgcatctgtgaaatgggcgctaggaaattacatcctggtgtcaacgacggcgatggtctgaatgaacgcctcggcgagaaatatacggtcgttgcagaacggaatctgaatttatgactgtcatcgccacccacataacatccttaaacattatcaattgggaatcatccttgtcaatagaaatcttgtctaagacctatatgtggaaagtaaaaaaaccaaattgtttaagctatttgttttccttctgtatcgctagtaatattaatgagtagactagatagatcccaagcctgcttgggttgcagatagtacatgtggttggggttgctcatcataaagtgagctggtccgagtgcagctcgacgtcggctaagcaacggggagaggctctatgacatcttcttggggcagtctgcaaagatccgacgggacattgaaagccagacagctagtacaacaaccctactcagccgagcgcggtgaattgcatatcgggctgggatgaaacgagaatatgagtgcagttgaaaatctacacggtcaagtacgaacaaatcatctcaaccgactcatgatggtctcctgtccccgttcaacagacaactccgcggctttagccttgatggcagtgagcatgctgcgctcgaaatcatcacgggtacgcagcacagcctcaacccatgaaagctgcaggtcccagtactcaagcttgaatgcttcataaacctccacgagcgcggggcccttttcagtggcaaggaggcgaacaagccaatcaaccagccgccacttctgcttgatagtaccctcaaatgagtcggggtagttttcaaagaacgcgaatacagtgagaacgtcgtccttgaacttgtctgtgaaggggtcgatatggcggcggaatttaacacccttgtttcgcaccgcagagaggtagcgcaccagcagctcgtccgagagttcctcgaccaggatctcggccaaagatgggtgcagcacggaggcgtagtccgccatgtagtcttcgaaggtggaagtgatacgcttcatggcaaattcgccgtaccagcgggacgtgaagaagtctggcaggacagtgtccagatcgacccagaagatcaggctcacgaactgcgccaggcagtgcgtgctcagatcaacatagccatcgcgcagtgcatccagctcgatggttgctgtggtgcccatgtacttgggtgtgaccatgggctcgaaatcggacttgaaccgcgtcaggtagccgaactggttgtcctcctcgttgtcgtcgatgcaggagatttgatcgttggctattccgatcagccagtcttgcaacagctgcacgccttcttggtctgcgccttctacttggtgcttcgcacattcctcgtccacgagtgcctgccatgcaatttgtcgggccttcaaggctcggaaaatggcatcaatgataccctctaccaggtctgcgcggtctgatgctcctgatgccataacttgttcgtggagcatgcgccacatgtcggccagtgtcttggtgcgaaagtgaccttctgcgttgttgtctagggcatctgagacacgctctaccagagactttttgtccgcgttgaaaatgcggtccatccattcttcgacggcattgatgatgacggcctgccactttcggactagttctggctcgcggtcgtcgagaatgttggcttggagatctgttggtgtccagcccagcttcttcattttcttgtagtacttgtcactccagtgaatgatactgagtaaattatcagccgggagctcggggtcgtcgatcatgctaagcaagaagtcatgcatcatccgatgatagatatcggtgtatgttttgaatatcttccatttcttcggtacaaggctctgcatgccttgcttgaccgtgaatagatcattgaagtaccaccggaacttcttttccagattgtctgggtctccaagaaagttttcgagggtctcttcgaattggctttgggcgtaaagctcgatagcctggatgaatttgtccttgtagccccgcacagtcttggggccaatgttcatggacttgaaacgacttgcgaggtccttgtggtctttctgggcctcttgcaacgctcgaactgtatcatcatttttctcctcgttcaagacaacaacagcaagtcgcacgaccatactcttgttgtctgcctgcaccaatggaatgaggttcatgcaagccgtgccaaggtgatcatcgaaccactcaataacagaatccaacccctcaaagtactctgtcagagtctcttcggagctctgatcctccgccttgcgaatctgatccatagcctcatcacggaaatcccttaaccgtgatatctgcatatgagcccgcagaatattaggctgattctccatatcgtcatcatcctctctgagcaaatcctccacttcctggatatccgcgccgaaattctccagtcctcgtttcatcatgagcgtagcatcgaaatgtctttgaatccgcgcaagttggtcaatctgcgcaaagtcctccacgctatgctgcgactcggcgcatagcttgtcgatgccttgtagctcgtcttttgtcttcgagacttgtcgctggccctcagtcaaagcaccaatgctacgttgtacggcctccagctggtctcgcagaccttcacgcaaccgggaatcaactgccgtcttcttccgcaggtattccgctttaagcccgctgatcttgtctagatcctccgggtgccgtaggaggtcttcgagtcgcggcagagcgaccgtggcatcaatgttactggcttgcgtcatggcctcggtatcaagtatatggtggtgtcgttgttccgggttgctcgaagctaggtcgaggggtgaggtgtcaacaatgcgggcatggggctttgcttgcgagaaggtagtacgcagcagtgcactatgatataaatccaggtactatcacgccggaaagagcgcagcccatagtctctcgtttcaaaatatgaaatactatatcagctatcacaggccgatagtcgtcgctgctgtcatcgggttctggcagaatacccacgtgacctaccgccttagaattggatttgcgggatcgcggccatctccatgtcggcaacatttcttcgccagatcacagggtcaattgcgcagcagatatcggctgcaaattctcaaatcaagactccggtatcatactagatccacttcgttccgttccacctattccgaatctgattccacgactccggacaaccaaaccaacctatcgaaagcacaaacatccgaatatcagatcctcttgatctgcacaatccaacatgtcctacttccgtatcacccttatgcgctccgcaattggactcccgcgccgctcaacagatgtcctcaaggcgcttggcttgaaaaagcgtatggcaacggtcttccacagcgtctcgccctccgtcgcgggtcaaatcatgaaagtcaaggaacttgtccatgtcgaggaatgccagtaccgcctcacgaagcaggaggtacatctcgagcgcaagcctgatcctggatattataccgaaaagagctgctctgagcagcggaaggagctcgggggtcagtgattgttttcattgagcttcgtgtggaatgggctgcttttcagactgcggttttcaccggtcttgaagattgcgatgcaagatccgactcttttgaaatccctttcgctctggtgcatgattgatcgatcacgtcctctttttttgctgttttggctttgcttgcatggagcgggttgctttttgttcgtttcttttgttcatgtatactacgtccacatctatcgggcgaatgttatatctgctaggtatccgaccgcctaaaacatttacacttcgtaagttaatctactacgaggagattattgtattatatgcatagtggaatctaacacttgaaataaatatgtgcaatttcaaaggacctggataataataacgccactgcaccagtagtttaggtaaggacagctagggggcaccaaaattatacactaggaacagtgcggataggctgagcgaagaagatacgaacaaggaaaaccgagttgttcacttaggctttgtacagggtgtccaagaagccttctgccagacggctgacgatactcttgtcgggaatgctgccagcgacaccgtatagagcagaggtatcgccacgctggaggatatatgatttgccctcgcgcttgcgctgctcggctttctcaagttccttgccgatgacttcacgcagatcagcaatgagctggtcgacagccttggcagttggaatagtgaaagcacagtgaatagccgggggagattgcagagcgttgaggtgccagcctttagcagacagatcatcggcgatgtcgtaaatgtcaatggcaccattcttgctgcggaatgcgaccacactgacgatggggtcaccgaggatctccatgtgcagtgagatggttggatcggtccgaacggctgtctcgaacttccgtgccgcgttgatgatatcggtgcagctgttgatgtatccgttttcgccgacgctcatcagactggcccaacaaccggcgatcagagcgccagggcgggagcccgccacggagggagaagcataaacaccgccggaccaatcggggtagatgaagtactggttgtttcggtatgatttgttgcggtagatcaagaccgagttgcccttgggcgcgaacccgtacttgtgggtgtcaacactgatgctagtcacgcctggttggcggaagtcaaagccaccttcttcctcgtagggcgaggggaatccggccttcttgaggtatgcaacgacgaaagatcccaagcagcagtcaacgtggagagggatcttgtacttggtagccagttgcgaaagagctgggatatcatcgacaatgccgtgggggaagttaggtgccgatccgacaagaaggacggtattgggattgattaaacggcgaacagcatgcacgtcgaccttgaactcgggctccgggcaagggactcggtgcagcttgatcttgaagtagttgcatgccttgataaatgccgcgtgtgctgtgtcgggaataatcctacgatgatcgatcagtcctgctggtcaatggtatagtatccccatgccaacttacatctcgggctcagtaacaccgcgctccaagaaagccttttgccgggcggccaagcaagccataagaatagactccgtaccaccgctagtggttacaccggcaccatccaagggggcattgaagagagcaagaacctagagcagacatcagccgaaaggctccaccaaatacgatactctcgatatagaatgtcatacataccatagcaaccacctcagcctccatcttccgaacaccagggaaaacatccggatgaatcggattcgcgacaccgaactgcccgaatgcttcagcctggagtttcaacagctccgcgcctccatggtaaacggcaccgctaacgcgaccatcttcccagcgtgtatgttcaagcccagccaacttatcaagttcagcgcggacctgctctggcgaccaaccctccttgggcagggtaagataccgtgtgacatccggcccagagtttaccagtttcgactcgagtttcgtgatagcagtgctcacttgcttgtcgacctgcccgctgacaccagggacacgcaggaagaggccatagcagaataggcggagcgagatgtagatgttgcggatgctgccgaagatgccgtagccgcggatggagtagaaggtcttgcgcgtataccgaaggatgaatagaataaatatgatgttgcgaatactggatcgagagcaaaatgcgtcagtggtgattgcgtttatgtctttcgttccttgattgcgcggggaacgggggattattcaacttacaggtcgatattcaaggcagagaggtgcgcgctggacacccggccgtagccaaccagcttgttctgcaaggcgactggcagcatagaagagctcattgttccccctatgaatagtctgcaataatgatgggtgagagtggcgatagggaggttccgagtagtacgttagtacgttttaactggttgagtctagcgggcctcggctgccacatgaagtaggcactcaacgttttgcatacaatgacgagacattggatattatagaggttgagtattgatagacttgaaattatagctattcacgcggtattataataatatctttatatctttacaagttagagtgacccttcatatcaagtcctggtctttctccactgacgtaatttgaactagtacggaatacgatgtaactaactaaatgcaaacagtctcaagttcggaataagttactgcctcttctgcgctaaatgtacaaagaaaggagaactctcttctcctaacacgaatgtgtttttgggtcccccaaaagaaaagaaagaagaaaaaaacagcaagacttttcagacccttatatggaaaaaatgtcaaaacaaatgaaaaagcatcaaatcatcaggtatcccgccacgcccgaattttgcccaagccactgtcagatggcatgatacaatatatgtattggtcaaaggaaatcgcctataccgcaagaccggcagcctgagccgcaaggagctccttctccttgacggcgaatgcggcctgctcctcggcgctcagatcaagaaggggcttgttctcgccggacttcaagttacggtggtaagcacggataatgctgtcggcatcatcgacggcaataggacggatatcagccatagccttaatcttggcagtgcactccttgtattgagcgtcagtcatctcaagcttgagctgctgggcacgcgacttgatggcgttccatccggtcaaacgagaggcgaaatggacgtagcgggtcatgccgaaatcggcagggttgataatctcgtaggtgctggggttgttgaggatggccttggcgtggataccagccttgtgggtgaaggcgcagaaaccggtgatgtagttgttgaaaggaatgttgacctcaacggcctcggcgacgaggtcctcaatctccttgagcttctcaagcttgtacttgcccttgacgtagtcgcggtcggcgaccatcatgcgggccatcaggccaccgagaggggtgataccgttacgctcgccgataccgagaacagaggtatcaatgtgagtggcaccggcctcgagggcacagaaggcattggcaatggcacaaccagtgtcattgtggaagtgagtctcgatgtcacagccaacaacaccgcgcagaacacggacgagctcgtaaacctggcggggggaagcgcagccaacggtgtcggcaataccaacacggttcacaccaaccttgtccacggcggagtagattgacagaaggtcaaccaggtcggaacggaaagagtcctcactggagaagcggatctcaatgcccttggacttgacgaactcgataacttcaatggcggcgttcttgatgtaggtcatgtccttgccgtgagagtgctcacggaggtaagaggaagtaccaataacaacatcactacggaaagtcagttcggagtcaagaaaataggacaaaatgacacgactcacactccatcaacaccggtctcgacagcaatacgggcatcatccatgtggcagcgaatgtgagtgagaatctgaacatgtcattagataccaataatcacgagatcagagcagaaccctaacataccttagccttcaggccaagcttgcaaatggcctcgcaatccgcacgggactgctcagaagcgcagggacttgtgagttcaatctatagagcaattttcgttaacctcagtccagggatataaagacttcgtctgtcccgcgactcacgtagtctacaccgaagtcatcgagagccttggcaatctcgatcttcttggcggtatcgaagaaggcgttggcgaactgctctccctcacgcaaggtagactcaataatcttaaagcgtgagacattgctaaggaaatcggtgacgccagcgtcgtgaccgtaggggttgcgagatgaggaggggtgtgggttttggcgagtctcaatgccaacaaaaccagtgtgatcgccatctaaataaagatcagtgggcaattctggtatattagctttcaattggcataccaggagcaatgacgccaggagcaccattgtcttgcccattgggctcggagtcggcaccagtacacatggtgcagatgggggagttgagtatgtagggtcgagattggaaaatatgaagccgggaagttcgggataattgagtaatttagaatgaagattgagatagaaaaattgagcagtatttaagatctttgtagtaagaaatcttaggaaaaagggaatgaagagtcataaattcatagcgccgaagtggtgggcggtgaatctgcgtaatggggggcacccccctcgctctcgggcggcaaaaaagaaaattttgattgtggagaggtgggggaagtacattttggaggagtatgataggatcagacagcctagcatggtctacgacctggtatgtacgatatattgcactatgactcaactgtctatcacttccaattcctcgcttcaccgaaatctgtgattgaaacagtatgtgtgatgcagtttacttcaatgcctcagaaccgacatcggaccttacctgtggggtctgactcataagcccagagctcaattcaactgacaatgcaattctcgacaaacatatgttgtatagagtgagtctataacagctatgtcattgctatcttcagggtgaggatccaagcatttgattctcattacagtatgtatccacgagtccgatgtggacgggatagtgatgtcatcatcatttccagtcttctagttggctcgagacccctgggcctgtgaaataatctgattacaaactcctaaacaaaggaagattcagttcatgctagctgcaagccccagatgacttgaaatcagtttacatacacctgcggtctttaaccaccagtacatcccaatatcagaagttaatacataaaaaagttcacttcacaaattaagccttcttgcctttttctgtcgtctagggaagatctctaagaaagatctaacaagactaccaaaacatcccactcccatcgagccaactggatcatatcattctcgatttctttcaaactctggccaagtgtgatagtcttcttcaatatcaccactcggttgtattaacattgtagctctatataatctgaccacaatttacattgattactatggaattggggttgtttcaatggtacaactaaatggttcctccagctcaacaagagtcttaacccctacggatgcaagattgagtttagtgcggctgttatagtgacaccaaagatcaatcatgcagtttggtgcatacaatctggaggtcattgtattggagtattgtattctaatccgggatacatttagtccaccaacggaaattgagagtattttgattctacatgttcctatagagaaagagtggatatcgataggggcaaatgattgcgtagatatggattcgtattcaaggcataaagagattgtatgtttttacaatattgatttcatacttacaaagtgttccattcgcaagaccaatcagatacatgcattatagaccttctgttcgaccgggttgaacgatatgcaacttgaagcaccagtgttttctagtcacatgtagtttccagcctccaagagacccaatagaaacaaaacgatcttctagtatacatcctaaagttgtggggtcgggaactttatgcacgacagaatccacatggaccgagaagattggaaaaaagatctaatcgattgcaataaaagaaatgatagtcagaaggcatttagaaggcatctggaatcaatctagaacattatctgcactaagggatggcgccattggtgcagagaaaggaggcgcgggagtgaattcaagcgttgtggttggccagcgctcaggccagctgtcgtcccaactagccatctccctctgaacaccattcttcctcttgtctctgactgtgtcatctctatccgcctttcagtcattggtatgtattctgatatcactagtttaaccttgtattaaacttgatccatcattcccgaaactgtgtcactaatctgttccacgcctcagccctcaagatgcgtttcacgtcgctcgtcaccctcctccctgccctggccatggcccaggagcaggttcccctcgcagaccgcttgcaggggtggttcaaccaggtcaagtcctacgtgccgacagcagcccccgttgattccccggtgatcgagaagctggccgcgaaggttaccgagaagagtgtcacccacctgtccctggacaactggaagtccgtccttaccccgggaccccaggcggaggattggctgatctacaccactggtggtaataagacctgcttcggtcgctgcggaactgccgataaggcattcaaggtgagttgatattttgcccccgacgcgtctttcgcccgtcacaaaactctaacatcttgttctcaattcctaggaatccgtcctgttgttctccgccgatcctacctcaccccacctcggatacttggactgtgaggccaaccaggttctgtgtgccgcctggtccgccagcgctccctccgtccagtactaccaggtccccaaggagccatctgttggcgaggagcgtgccccgactcctctccacaacatttacctgaacgccaccaccgtcacccccgagaccatctacgagatccactccaagaagacctacgagaaggcccccctctacgagggtgctctccaccctgttgacggctgggtcgctaagtaccagctcaacatccccatgggctacgttatctggggtctcggtgctgttcccagctggctgttcatgattggtatcagtttcttcagccgcaccatgatgtaagttggaattgatttgtgcttgtcatttgatatcagtctaacaccggaattaggagccgtcgcgcgggtcctactggaaacgcccctcgtgctgcagcccccgctggtagcgcaaactaaataacctcttttggtccctgttggtgttttgggttgtatataatcagtggtagtgtattgtgacgtgtccaatatactgcttgggttggtttgtgttctttgttgggcagtcatctgtcgggaatggagcctcttcgatcttaggcctttttctagctacctttttaatcaacgtatcctagctaattatctagtaggagattgtaacagattcaccgaatatattggtaactgtttgatgccaaccttgctttgcctctgtatccaaaacattatttaaacagtatatcccattacacagtacgtcccgaaaccgataaaataatagcgaacaagaatcctcaaccactacacccttccattgactttagattcttcccgcaattgcgtgtgtatttcctcctacgaatgtgacaaagtaatttcaggcatgtattcgcttgtaatttgaataaacattcagagatacgaagtgcataaattcttcgacatgctaatgccattgtaccaatttctaggtatctaaccacccgtcaagtcgcaggcctgtaagatatcccaaatgtgtcgatccatcttctctgacatccagttcctccatatcacgaagaacctgctcgatatattcgctgacgccgctaagtttcataataagtgcaatggcgcggtggacattgagaagccggggggatggcggatctaccgtgtgatggagacttagggtaagcgatcgggtgacgggaaacaagggatcacgtaagaaaggactgcgttctgtagagtcaatcctgtactgatgttgtatgccagtatgttcgaaatagatcttgaattcgccgaatagccggtggtagtctagcgttagagtgagggcgttcataggaccgtcaataagatggattattccgggatcgaatatgtccaagatccgaagagcacttttctttgaatcgctctaggcatatcagcaccgtcaaaataccaatcctaataatcagacataccaaatcggtttcaccagaagctaccgtcgtcagacaataagggaaaatttgggcaacctccaagtattgaaattgatcgctagactcatccttcaataggttcccgtcatcatcagcacaaaattccgcattctcctcgaaacgctttctggctgctgctctatcgaatttgcgagacactacacagcggtggcggtcgcgtagaagacaagtctgctgccacgttccgatctgtgttgagttctgtagcgatgataacgatatgggcgttggctgtgatgtcttgactgatgatactctaactgcaattgcgaatgagcatatacttactagaggaccattatatatataagagattaacgaacggggaaggagaaaattttcaacgatatactcagcaaacatttctaggctctcgtgaagcttgtttatttgttctggctcccatgaagaaaatccttcgaagaattccaaggcgtgagtaatatcagaatcgaaggcatgtccttcatcatcaagcaggtccttatggatatacgagaggaagaaagtcacaaaggtatccggcgatttaacgtgctcgagagcagcctggataagtgacgcaggccgatagcccttccgaacggtcttctcggagccataatgccgtataagcctgatcactaggttccttgccgacttgtgctgttgtggtgttaatgataagggcattgagaagtctaaagccccctctatggagggatggtgacggtgagtcgccatcgctagaaccttgcgagccttagggtgaggcgaggaagtagaaagccaaagccagaaccggcgcaacgaagtcacacaattgagaatattgatacatcttatatagaatataaagacatccagtctctaataatgtgtttcatctgaaatctatcaaactaacgaagaaaaatgagcccaaggtgggcgcagtggaacaaaacgtgaagtctagggcggtcgagcttccctcaaatttcatttcgccaggccgagatctccaaccaccaactaaccaactcaaaatggccgcaccagtaccgctagatcgcataccccccacgacggccgcctatgtgattgcaacagccatcattgcaggcgtgaccggatatttcatcggccaaggctcctcaatcagcctcttcaaagaaaaggaagggtggccaaacagctacgatgtgaaggtccacagccattcctccgacgaggaggacgaatcagactctgaagaaggagagaccgacgaggaagatgagggcaacggcgaagaactgtcgagcttcaaggacaacagcgaggaggtgaagctggtgctcgtcgttcgcatggacctaggcatgaccaaaggtatgtgttcttcgcgcaacgtttcaattattcctcacatttgtgttgcaagcgcttacaatctcttccttctaggcaaaatcgccgctcaatgcggccacgctacccttgcttgctacaaatacttccttgaatacgcacctgactcgcctatcctcagaaaatgggagcgcggtggccaggccaagatcgcattgcaggttaagtccgaggatgagctgctggtgatgcaggctcaggctattagccttggactttgcgcgcgcgttattcaggatgctgggcgcactcaaattgcaagtggcagcaagaccgtgctgggaatcttgggacccaggagcgtggtggacggggtgacgggacacttgaagctgttgtaaatggttacacattatacatttgctcgtttggcatttagataggcaatgacgatcatgacctcgacgaccaggtttccgacgttaccgtatccatcgcgttgagcatgcgacacacggtgatacatcacatgcggacatagtcgacataattgtagcacgtttcctagataccctagtcgcgcaaaaaggggacctcctttgaatctaggagctttatagtggaattacgagttctatataagagatgttggcaagtcatggttattccctaacctcagcggccaacggccaatcggcaaagagatatgaaatatgacgccgtccgacaaccaagctatcaagccgagctcaccagtgggagctcaagacccgcgtcacaaggcgcagacaattattctgagatctgtcgaccggaaaccgtaaaggccatccacaaaaatgatggctccaagctcgtcgaaatgcccagctctcaaccaccacacagaaaccagtcagactggagtccatggacaggaaatctaggcacagatccggttttggtaaagaagaaaaagaggaagggaaaagcggaaaggctcttatttatgtccccaagtggggccggtaagattttatggcgctagcctagatagggatagtgcaatgtgatcacatcacgtgatccgattgcggttatcaggaatccaaacggcgttgcgctgatagccattagtacctttccatccctccttcacacaccgtcaaaatggcggacgctctatccatcgagcaaaacaacaagattcgagtggctcttggcctcaagccactcccagttcctggtgccggcccagaattcagagaagacgacgacagcgagtccggcgaggaagaagacccagccagcactctcgagtcgcgacaggcgaaaagttatgaaaattggaagaagatccaggacaccaccgaagcgaaacggaaacgagatgagaagaatgccgccatcaagcgggcgcgtgacattgcccaacgcaatatacaactccaaggatcgacactaggcgaggcgaatggcgacgaactcgataccaaagcctggctgtcacaatccaaaaagcgccaaaagaaaatcgagaaagaacgcgcccagagacttgccgaggaactcgaagagcgggagcgccttgcagaagccgagtacactgcagcggatttggctggtatcaaggtcggacactctgcgggtgctttcgatggtggtgaagatcacatcctgacgcttaaggacgcagcggtggatgatgaggaagaggacgatgagctccaaaacctcgatttggtcgagaaggaaagaaccgaagagaggctggagcttaagaagaaaaagcctgtctacgatcccacggcggagaaccagggtctcctttcacaatacgacgaggagatcgatggcaaaaagcgaaagagatttacactcgacgcccaaggctcaaccgaagaacgcgaagcaaagcgacaggaagtttccaaccagttgcggaagaacattatcagcctcgactttgaaccggaagtgccatcatccgattacatggacatcagcgaagtcaaaattaagaagcctaagaagaagaaggccaaagctacgaaacagaggactttgatggacgaggatgacgttgctccggttgcggattcgaccgatacacaaggatcttcagctatggatattgattcgaagggtggagtcccagtctctgctccccgcaagcccatcaacgaagatgtttctttcgtggatgacgatgaccttcaagcctctcttgcgttgcaacgacgagcagcattcaagaagcgcaagaagatcagccctgaggagcttgctaagcagcttcgagaagaggagactcagaccccgatggatattgaaaattcggataacgagggcgaggggcctggccttgttatcgacgaaacctcagaatttgtggcaaatctacacaagcctacacttctggagcaagaagaaaaacacgctacaaccgcggccaaagagcgcgaaagttccaacgcggagcccgaaggtgagggcgtcgagatcgatatggaccgttacggcgatatcgaagacgaagaggaacttgctgcgcgcatcgagcgcgatgaagtatctgcggcccagccaccacaacttaccggcaccggcctagaagaggaatcaactctagaccatggtcttgctgctactctatcaatgttgaaatcgcgcggtctcgtcaaagacaacgacagcaccagccaaaacgctctcatgcgtgatcgccagcgtttcttggccgacaagtcgaaccgcgagtccgaaatcgagcgacgcgcccgacagcagcgtgagcgggaccgtacctctggtaagcttgatcgcatgtcagcccgcgagcgcgaggagcacgcgcgctgggagaacaagcatcgtgaccagcaggaagcacgtcatatcgccgaggtattcaaccgcgaatacaagcccgacgtgcaactgcggtatgtggatgagttcggtcgcaacatgaaccagaaggaagcattcaagcaacttagtcaccagttccacggcaagggcagtggaaagatgaagaccgagaagcgcctcaagaagatcgacgaagagaagaagcgcgagtctatgagcacgctggacagcagccagaacaccggcatgaacactgctgtgggcactgctgcgcgcaagaatcgccaggctggggttcgcctgggctgatgctttttctttcttcccaatagccaaataccaatttacgatatccaaagtctagcccaaaagtccttccgaagctccgtagatccgcagatatatttagatagttatatttaggcctgatcagttagacgatcaggcaacgttgctgtagggagaagacggatgtcaccaagttcaatcttatgtatccgacttcgtacatatgggattgacatacaggtatttaacccagttgtccctatacaaccttagaaaataatcaaggtggtcggaatgtcagacacgaggaaaaatggagaattccttctccaactgtgaggggaaaaacggtgtagatccagacagatcagttcaccggagattcgacttgccgacaactgtagaaatgggctgatgttgctatacatgcgcgaatggatatatataaggaacgcacgaatgaatccagccaatgaatcatatcctaaaccctagatatcattacaattccctcatctctagcaactaaatcatagagaacaacaaatatttagccggaggattgctgcaaattccgattggttgtacctggtacctccacccaggcggagatgcataccaactcgcaggtacccgataccgctatcacatgagtcagggcaaaaacatcgggactacgtctccggtcctttatattccttcgctctcccgatccttcccttcctccttccaatcccaaatccaggaggtccaggtcttgccctttcgattttcttcgtctactctgccattatgctttccactttcagagtcgccagccggtcggctgccccccgtggggtcaacttgcgcaccgtcttgatcggagctagaaacgcatcggcctgggccaatgttccccagggtcctcctgtaagctttgtgcttgcaaccaccgtaatcgtggtttgaaaggccaattctaacgtagctcggttaataggacgccattctcggtatcaccgaagctttcaaggccgactccttcaaggagaagatcaacctcggtgtgggtgcctaccgtaagcctcgtcccgaacaatcgtgtcgcgtaatggattgctgacgagtcattccgctgttttaggtgacgacaagggcaagccttacgtcctgccctctgtccgtgccgctgaggacaaggtcgtcgcagaccgtatggacaaggagtacgctggcatcaccggtgttcccagtttcactacggccgccgcggagctcgcctacggcgctgactcctccgccatcaaggacaaccgcctcgtcatcactcagactatctccggcaccggtgccctgcgcattggcggtgctttcctccagcggttctaccccggcgcgaagaagatctacatccccaaccccagctgggctaaccacaaggctgtcttctccgactccggtctcgaggtcgcccagtacagctactacaacaaggacaccattggcctcgacttcgagggtctgattgccgatatcaaggccgcccccgagggcagcatcattctgctccacgcttgcgctcacaaccccaccggtgtcgaccctaccgaggcgcagtggcgtcagatcagcgatgtcatgaagcagaagggtcacttcgccttcttcgacatggcctaccagggctttgccagcggcaacgccgacaaggatgcctttgctccccgccacttcgtcaaggagggccacaacatcgctctttgccagagtttcgccaagaacatgggtctgtacggcgagcgtgtcggtgctttctccctcgtttgcgagaacgccgaggagaagaagcgtgtcgattcgcagatcaagatcctcattcgtcccttctactccaaccctcccgtccacggcgcccgtgtcgcctccaccattatgaatgaccctgctcttaacaagcagtggctcggtgaggtcgagggcatggctagccgcatcattgagatgcgcgctcttctccgcaccaaccttgagaagctcggcagcaagcacgactggtcccacatcaccagccaggtgagatctcaaaactcgatttcctaagtatgatccaaatgactaacatgatattccagatcggcatgttcgcttacactggcttgaagcccgagcagatggacacccttgctaaggaggtaagatttatacccgcatactttctctagtctgatcgctaacgactcccctagcactctgtctacgctaccaaggacggccgtatctccgtcgctggtatcaccaccggaaacgtcaagagactcgccgagtctatcttcaaggttactggttaaatgcaaaaccgcttgaaaagaaatcttgaaggatatacgataaaaaatgaatgttaggggagtgagagaaaccgggcctgggtttcgttttaaaatctcggtcctcttgtactgatatctaatgtctctgtttcaaattagcattgttcggctctgtccgtcttaacggggattttggattcgttttctacattgttcttttcttgttcttgtggaaaatactctgtaaactcatgtagtccattgctctctcatcggcattataactttggatttatgccctgattaggcttacagcccgtaatgaattatgtacctatgttgtagatgagaatcttgatatgctaactaaatggggttagtcctggtgaaatttagccctaagccctagttcgctcgatggggccgtgtcaccgcgtgacttatgtacatagtcaccccacaaaatatttgaacattctattgatagttcacccgttacttttttctcagccaatcaatttcttccgcatccataccacaatggccccaaaaagaaaaagatcgacgttaccatccaaactccgacgatacgattggcacggcatcgggaccctggtccgagcgcatcacggctagaccagcgaggcttatccacaatgtccactgagttggcggacgattggtcgactctagcagcaaaagcgcaggcacggatttctcaatacaaacctcagtagcatcagcaacacgcaaatatcctccccgtgtccctaaatgcatttattacctggctacctgaaggtgggcgtgaatctctggctagggacatcataagttcaaaatccgacaacgaactttatgatttctttagcaatttgcttacaggtcttgctacaccgagtgagtctaggaaatacttgtctagagtaacatcgagcactaatcaatcctcgggattagtgagagcacgttcaaagccaccatcagtcaccccctccccgcacgcaaaacgcgaggcgcatgttgaggctgtagcagccacgtttacccaaccagaaaagcgaacgtcacagttcaagaaactctgtctcaaacgcgatgataatcgttgcgtgatcactggcgaactagacattgaatactgggaggagcttaaccgcccagaggaaccctatttcggacggaccgaaggcgcgcatatcattccgttttgctatgcatcatgggaaagcgccgaggtattatacctgcagtgaataaatgattatatacaaatgaaatgataggatggcaagtggaacctgccggcaatgggaggttttataccgctgctttccccttgtcagacaagtccgagaaggaatcggtactgaaacaatcaatgatacctcaaatgggatgaccctacgcgcgaacatccatgacgagtttgggagatttaccatcgcattaaagccaactgtaagtagccaatggcacatcgtatgtattacggtctgatctcactgacatacaaatgcggcattaaaaccaagagaatgtgtacgaggtcaagactttcccgcgcttccccaaatgggatatttcagcactgcccacaagtagcaccatccacttgacgcaagccgatgatgcgcaggacgtagccctgcctaaggcagctctcttagactgccattaccgactttctgagattctaaatgcttcggggatgggacatgttattgatcgttatctcagagactgggaggacatcaagggcgaggccccaaaaaccctcgatgaggctgggcgaacaaatgtcaacgcatttctgcaggctggtttgtgggagcatgctcttgcttgaaatgacaatcctcgtgcctttttattcattaaagccaatgatagcttcccgcactcataggccatccatgtcgatgtagagatcacctttgtcaaggatagaggatgtgtgagtgactagctttacttgaccaaattttggatggaatagtacccttccaaggtctaaaactaggttgataggaccgatcttaactggcgtgggtcgagacatctcctgaataataacctcgtgggaagaaaaggatatagatatagtcttagatagacaaaaaaacacattgccgggcatgtcattaccatctctatataactatactttcagcgagatcaagtaccttaatctcttccctattccaagatttgttctaggagttgagtaactatctacaagacatggataaactaactaagccaaatgcgtacaaggactgtatgcagccaacgctccacagtgaatcaatacagcctagaccgcgccgatgagtctgtacgacacataatgtgctggcagcagcccccctccgccctacgttgcatctacacaccgttctttccacgtcgtctcactggttaataaatgaattgccaagactcaatgtactccagctatagagcttgtaacagtcatacccaccttgatgcaaatcgggcctgagttaagcaaggatctacaacgctgcggctaggctcattgagtagcttggacgacctcggatgtccacggatatgacacgcctttactcaatccaaactccaaagtggcttagaaagagcacctagcgtcatatgacggggcaatattagctacatgcctgggcagttagagtagtatatgaagaccgagaatgtggagtgtagtgttgctaaaatggtaggcagaggaacaaattcaaaaaggaaacatgtattaagaatctgtcagttttggggtaatatgcaatcgaagagaaattttgtccagtgaccccttccgcaacaccaagtgcgccataacttccaccttttagaaagccaaatgaatcagtatcctatcattccgctgacgcctatatccgagccagcgcccggaggtccgagagagggacagatgcagcctggaggtgcattagcggcagagtatgggtaccactccggggatggagaaggggtgacagatcggcccatgacacgggctaagatattagcaggtgagtgggcagagccttggcttgaattgagaagagcgaagcggaggaagacctcggaggttgtaacaatgattgaaatgacgatgaggacaatgataatccaagtttggtctagagtgaggttagctgaaaggttagggagcgaaaagagaaggtcagacatacgggaagtgcggttgtcggcaatcgagtcggacaagatttctgcaagatcgaggaatacgcgacatctctcgttgaggacctggatgcgtggtttgatctccaaatactcgcgcacggcgatgtagagcgggtaaagggttggctcgctctcccagaagaagttggggacgtcgagcatattagaagctagtggaaaatgttagtagggaataaatcttacctgcagcatagcgtgcaggacgacccaaaaagggggtaaggaacttacaaaggttgacctcgacacgactcttgaacaatcgacccaagatccggaagacttcttcgcgcttcatgcccagttggcctgaaactgcaagacgtgtggggacgtctttagcatccgccatctgtcgggccataacttcctcgaagaagcagagtttagtgctctgtgcaataccatggctaatagcgagcttgatcatgtggtcgccactgcgaagagtaatcatatcgttatagactcgcgggcgcgagatctcagtcgaatactcgaaatggaactcttctgtctcaaagtcctcctcatcaagaggcatcgtcgctagagggatagggataccagttgcagatgatgttgcaaatgccagatcggccagcaggtctttctcttgtcgctcggtgaagttccagaagacgacaacgccgtaactgaaaacgaacatttcagccacattgtataatgtccgagctggggcttgcggtgttgaagacgaggaggatgtaggggctggcagagagggacggtctcgaataaaagtgtgggtatcatccgtgctgtgtcttcggcggcgaagtgcaggttcaggcgaagattgcccagtcctttggttgctgtctggttgcgggagtggcgagatatgctgcaacccatcgacactagagccggagctggtagcttgttcatggtcatcggggaggtggccacgaatgtcttcactgacaccattcaagaattccgcatgatttccctcctgggaatcatgaacctcaggctgtggcggcgcttcataatggtgctcatcctctggacgattgtgtccaccaaccgagtgttcctccgtctcaagcatatattcatcatgatgatcacgaagttcattccgttcaatctcctcatccaacaaggattttccaccggggtatttcagcacagggctactccgcagacgatacccctcatggcccggcaaaagaggaagatgatacgcggtgtagagacaatcatcatagagctttgtccgcccaccatgctgctccttaacaaaagtagcaagcgatcccatcttatacgcctgggctgtacagtacgccgtaacacgcgcaagcttttccgtccggcgtgcctttggcaaccgctccgcataactcttcgcgcgctcaggagcaatacggcgtttcttcatgacttcttcctcatccaacaggggtgcaaaatcattatcaatgccgaaatcacccccaagtcgcttcgacacgagtaattggcgtctgatcctttccgggtcgatatttttctccttggctagacgcgcgacaagctcctcgtccacgaggtcggcaccgtcggagtcatcatcttcttcaatttcgccctcctccagttcgccggtgtcaggcagaagaaccagcttttcactgactttcgtcgttcgaggcgggagtcgcggttgcgcggcgagtcggcccatcgtgccgccggatcctgctgctgtgctgctgcctgagctagttatcaagcctccagatgcggaggcaagacggcgtgcccgtgaaattggtggtgggccgcgctgctgcattgaagggacgtcagaggcgtattggaggacgttgtcgacggtgatgaatcgggttgcgggcgagcggcgtcgtcgcggtatttggggctgttgctggtctctggaatctgtgacctgtattcaaaatatgtgttagttgagcttggttgtgcggttgatttgatagtcaatcctaccaagacagttgggctgcgctggctagtccctcgtcctcgggccggcggagtcattgtcaaacgagcttagaataagcgcttgagtatgtttgtttgtaactatttgccggcactttccaacatagaagagataattgaccgtgtatgtatcaattgctatgtctgatgctccgagccagcaagttcgaatggcctcgagactaaacccaactgggaatagttcattgagcgaccaaatgacgtctactcttacagtcacgtgcatctcattcactaggtcatcccgtgacactgccacgtgctacaccgctcaatggatcagggcccacagtacctcattgggactagcagattgcagatggcgttttggtcgatctggggtaaagtgaagatcggccggaagctggttctagtgcttgttgactacaaaatgaggtgagactgaggtattgatattttgtctatttgtgaggtctcattggtttccgaggtcaatgtggctcttgactaactgtttgtgctcattggtggcctagctatccgaaagcaaagtgctagaacatggaaggaaaattgggtaataataatatgaattgctatggtaacgatgagagatatgagagataaacataaaaacgccgtgctgtcggttcatttggcactcttccgagggcgaactggtcatgcagatgggatagaagagaataacgaaattagattacgaatgaaggccatcacgaagctgccgatcttcgtcccagatttccttcttcatgcgctgtagatggatgtgctgcttttgcagcttgtcgaggtcgacttggggtggattggggagcgctgcaagggagtcatgtaggttgcggtacttggtgtaaaagttcttgaatttctgagatttctcccgcagctgctgtctcagaatttcgtagctcattggtggagatgcactaccagtgctgccaccgctggaggagctcaccgctcggcgacgcttagcttccaagtttccagtaggacgtcccgcctggggcgcggacaattgatcagattcggccttgcgcttcaatgggttggtggtagtggaggtagccttcgcgatgccattggtctgtggagtagctctggcaggtttggctgcggcagaggctgcgcggcccactttgggtttggccagctgggtgatgagaggcgaagatgaagatgaaccggaggattgattctggctgtccgctcggctgcggttgctaccggtagagtcggacacgttggaaggaggggaggagccgagtggagacggcttctgcggtgaagtcgagggccgagaggggggacgcttggaacttgtaaccttggcagccggtttggatggttcaagcttaggtttcgatgtctcgggtttattcttgggcgccggagcaggagcagatgagactgggggagtatcggcggtgcgagccttggacggtgccttgattttcggtgctgggggcttcgaattggatggagtccgcttgtgttccttcggttgctgcttgggtgcaggcgcgggagcgggggcgggggcaggggaaatatcttgcatgtcggtatcatcatcttcgtccgaactgtggacgaattctgcggacttgatcttgctgtccactttgactggggccttcccaccagtcttcttcgtaacccgtccggtgagggtactgttggtattcttgggtttggtagaccgtttcgtcgggtccttgtcgcgggctttttgtgaggccgaagcagtcttgggagcaggcgcggatccctttgtagcgcggtcggtctcattgtccttgcccgagtcttccccattggctttggcggatggtgcggcaggtttctggggtgggccagtacgaaggttcaaacgcgaaaggcactttcccttgcctcgttcagcctttggaagaagtgtttgccaaagtttgtcggaccgagagatgcgcatgcgatcgaaggcagagatagaattctcaatggcctctttccggtcctcctcggtgtaattgaaaccaaacacatcaagatccttgtaaactttgtccttgagatcatatttctcggggttgattcggttcagaactccgaatttctcgccgagggcggtgcaatcgtcgacggtggtgcgggtttggcgggcaaggaacttggccgagacggcacggacagcgagaaggtgaatgaagggaaccttgagggcttcaagcctcgcacggtctttgttctccatcattggagcagatgttggagtcattgcaaaagaaggcgacttgggagcacccaagataggacttgcggtgagggaacgattggcagcagtcttgaggaaacgatctttctcgagctcgactttggtggtgggacctttgtagcctgacttgctgccccgaagagccttcagctcatctgggtgtgagatgatgtgagtcttcttagactcctttccccgctcatgggcattcaatttttcctccaaatctgccagcgcctgatcggtggccgcagtggcatttttagccttttccacctcgaggctatggctcaacaccccggtgaagtacagtgtctctttatcggataagctgtggtagatctcggatcggtgtgtttcggggtaggcatggaacatttgagatttgcctccgtagtgaagtgacgggtgttttcccagccggactcgagccggttgatccttccgtagactctggatcagatcatcgagggtgctctgcaccaaattcaatcgcatgatctggtttggcttgacagaaggatcaccggactcatctccgaggtggagagacagcccggtcgggggaatattcagactggtcgacattatgggagtggaggagaggtcagggtagggaggaagggagagggattcgagattgtgagcagggtcggatggcagcgtgagagctgcaggtcaggcggccaactgcacgagggaatgaggtaaaaccatacgccataagatcggcgttgaaaatatggaataagaggaatcaatgcagaatgtaggatgcaaatggtatagacagagaagtgaagaagaagaaagatgaggagaagggcagaaaggccaagagcaaggcgaagcgtcggagagtggggagagctgacggcgattccttgtaaaattacaggggattttcccgattttcctttttttttttctttttctctaattaattgtccatgtacgggtattctcctatgaggaagtacgaagtacgaatgtgcaaatgtgcttatgctagtatagtattgaagacttgaacatatcacactcctaatgctctatttcctccagtccactccgtttgatactgtatcggcctttgttctgactccaagtccaacttgtaaacttcttttcttcctttttccttctttcccctttgttctccgaaacccactacataagtacctgactacttacaactatcctactaatatatagtcaactccaatatatacacctaactactccgtagactcggcctacacctgtatacccaatcgtaccaagcgcagccgactactcgcaatctagacaattactattacaatacaattaccgtgaggagaaaaaaagcgatgctccatcacggggcttcccgagtccagtcttgtttaccgatgcgggtgcggtcgggtctcatttgacttccatatagattaaaggttcgtaactatgtttggttaaagaactctgacagcaggtctctctaacggcttgggttgactcaacagacagctgaatccaaaaccctgggagaaaaacattccattctttctccaaaaatcacccggggtactcatcatttccccgagatacctcaggaatgccacaacctggtttgcccctcgttcatatgcacccaggcacggatagccaacccgaaaggtcccagttcaagtgttaccattcaatgtttcgccctacatcggactagtgggcttgctacggacgcttactcctttcgataggctaacgggaaacggggccaattcctcgtaccacatgttatcgggctcctattctggctacggggtacttttagcctttcttgcattcgactatgagatgacccgggcccgaacggcgcaaatcaccatagagtggtcgtctccatggccatccccaggctatagactgaatgccacctggtgttcctcttccttattggatcttgagtttcacagctgcatggaaggtccatttatgcatcccaatggagcaatggagagcaagccattaggctccggggtgtatattgtactccgtattacgcccttcttattttttattccttttttattctttatccttttactctttctgttcctttgcagtttcgcccccatgttgggtgctggactggtcaattccagtcgatcccaatcaacccaaattaaataacagtggcaaacccaaataagatcaagttacagttacattgcgagtccagtataagcagtgtacacaaatgacctgcatggcctactcaacctgggcaagtgtaattcttcataagccggagaggggaataccgtggatcccttgcgccgtccggcttattctccaattgtctagtctgagacaaggggaaatattagccattgcccattgtttgccttgctcgatctgcgcagatccgtgcagaactgtcggctccgaaaatcctcttcgtcatcgtttctacctcgtattcaatggctcaggacattatcaaactttgaagttgataatcagattaaggactctatgaatttggaataattctacaaatctccaatatccaattctgcaccccaaattaacccatcccacaacgacatcgtcaaaacttccgcagcctcatcccaacagcctccatgattgcctcactaccaacaccccccgcgatcgcaacagggtcctataggatcgccgccgtgatcggcgccgacgataacgccctaacaaaaccccaagatctgaccgcgatagccgcaatcgccgttcgcgctatgaaccctaccaagccactgaccgtcgatggcaaaatggacacgatgtctccgagttggcagataccattacgcaggtaatcgctctaggtgctgtaggatataatctcgaagatatagacgcgactggcgtgctgcgatcggtaaatgaggctacggcataggttggggttgttgtttattgtccaggcggcaggaaggctgggtttcctgactttgttccataaggggtatagttaatgtgacgatgaatttgcaagtggcatttctgagggtgaacaagattcgggggttgggcgttgcaaggtttagtattgggccggagttgtggcgaactgctatgaagacgtttactgagcgggccgaggtgtcggccttgtgagtacatacgctgttcttgcctacacaaatacatggatatattacgtttgactcataggttaggcattcaaacgtcatgcagcctaaaataaaccgtcgagctttaattcaatataacatttgaagtcattaattgattccgagtacagttgctgtcggcatcggcgatcctgaaccatcaggtccggctacaaatcccattggtgcagatattcccataacagcagtgttcgtcgacaacgcaaggcccattgtcctcgctacaagacggccacctatcatctgtcgatcggcatttgttggcagcgcagtagcccgagcagcattgattgttcggggtgccgaactcacaggatgctagtattaattagtggtacgttcaaagttgtgattggatgtgatatctcaattcttacagtagactcccgcgcaagtgggtgttgggacacaggttgtgacagtcgttgtagagggtgagacaaaggttgctgttgtgcatgtctcggtgagaacgcaagccggagcactaccacatcctcctgctgaacaagctgctgcttctattttgagggaaggtgtggttagtagggtgggggcgaatgtaggtgtttgttgggatacatacggctcagggcgaggtgagcataggtaagaataagagccttccagagatgcatctttctggcgtagatatttaggtcttagttatgcgagaacagagtgtgctcagttgattagagaaattattcagtaagaccttctgtcggtgtctatatatacatcacacaccaagacatacaaatgcgtcaactctagggcaaaccgtggaacacacggccagatgacctgatacgaagccatctacatcagttgatagtaatgttccaagctcagaccattagccactaccccagactttctatttctgccacggtcgatgtttctcctaacgtcatatcaatacgagggtcaacacgaggacttcattaaactcatattcaattggccttcatgtgagacactattcatcattcaagactatgcttccttcggttttgttcctgttttcctttttatagcaacgtgatgactatgatgttgctgggtaaaattgccgactagtggaatcatgcttggaattgatcacatttttatctcgtatcaaatcatgaattaataataaatctcaaaacacatgttagtatatggcacatgacaccaagcctaaaattagcccgtatagagaagaaataaatggcaagaattcttcactatacgactcgccaacctctatcgaatgaacgagttggtgcgacttgagactctgtcccgttcgaagctgccagaaatatgttcaaatcttcaaatcatcctctgggtcactcactccaaagtaacggacatattccgttgattttagcgtttacatcaccgctggatctgatgagaagcttcaacatcggcattcaaccgcaagccactgcacaattgatcaatcctccagataacaggttgcatccttctgtttgagccctccattcaagaattgtcccgagggtactctcatggcctgcgagaagcgcactaaccgcgggatgggttggtggggtccaggtttgctcgcccacacagtcgttcaattgagccccgtgattcaggagcagacttacaacagcatcatttccagcgctcacggctatgctcaggggtgtctctctttcgaaatcagatggaagcttaggtgaaatgcgatatggggacccaggggccggaagaggggtccgaggtagaggcccaaaaaacctaggtggaaagcggcgaatcggttctggtttttttaactggcatggatgggacatccacataggccccccagtagagcacgcctctttcattttccttggcaacacatttaagccttggctttccgagcacttcacattttgttgatacagacgggcaagaagaaggtcgtataggtgatagttcacctgtagtaggtgcgagagatccacctcggatttcagattcgtacttatcaagagtaacaactcattgggtagttcaagtaacgaaaccatagggttgaaagtgatgtgcgatatcaaagagtacgaattagaaaggacgtcagtccactagcgcggggctgtgtacgggctaacacaagaactaaaaactgccaacagcgcacagcgcaggtgcgtgatcgattcagaattggagcggccccaaatgttgatatcattcctgttgatttacttcaaatagtgcaagacgatgttttagaaccttcgaagtaacctcgacttataaagatagacacaccacatttctgcaccgccatggtggttgctattacactagattactggcctggtatcgagtgacaggcttttctaagaagtcagtgtctcctcatcctagaatattatagttcagatccgcgttctacaactttagcggagaatatgtaccttttatatgggaaacgcatacaaaagatacctcgaaactgtatggtttctaacccctccaggcctttgggaattggggtcgcgaaggcgagctaggcttttcgactaaatcccaactccgctctgccatcaatcgggaccaaagtttgacattcggttctcatggctccccctaatccagagtgagtcctcgaacatgtgcatctacatacgacaattagcggaggcattaaagtcaacatacgaattctgtaatcggcgaagctaacacagatcaccagcttccccgcagtccgcgcctgcattttcgatatggacgggcttctcatcaactccgaagacgtaatcagtctatccacaaaccaactgctggaaaggtatggaaggcctccgttgactccgtcgattcgagcccagctcatgggtgtcgcagactcgacaaatggcgacatattccacaactgggccaaattacctatctcccgcgagcaattcgcccgtgaatcaagcgagggcatgcgactacgtttcccggattgcaggccgttgcctggcgcggagaagattctatagaatctaagccgtgcacggagtgcttcgtctagggacatgattcagctggctttggcttccagcactaagacccagagttatgagttgaaaactgcggggccagaatcgaaaacactgttgagcttctttcggtcggacaggagagtcttgggtgatgatccacgcatgcgacggggtcgagggaagccagcgcccgacatttatttgctcgcgttgcagtctttgaactcgggaatagactctgaggaaaaggctatcctgcccaacgaatgtttagtctttgaagatagcatcgctggtgtagaggctggaagacgcgctggtatgagagtcgtttgggtaccgcatccagatgtggcggtcgagtatcagccgatgcataaagatatcctggctgggagatcaggaagattgaagttcggaaatgactggcagctaggagagattgatgatggctgggcagaaattatacctagtctggaagactttgattacgagaagtacggccttgatgtggcatctcgaatatcttaatggaacagttccaattcaatttgatacctgtgtaacggcaagaatctgttcccgcatataaaaagaagaagaagataaaagaaagaaaagcgttcattaacgggcccaaaaagcaacgatctcgtcaaagtctttcatcgtcaagctcttcaaaagtcgatgctccttggtgatctcattcctcaggcgacaagcaaatattaaggcaatagaagctttttgcatcttgcccattgccgccaacaagtttccctggaggaaagtagtgagagcgatctcattcttatgcgcattcggatcaatcgaccaaattcccaacgcgtcgttgatcatagcactaaaaagcaatttggtagcctccggggaatctgatatagctgctgatgtatcctaagaatgtggggataaatcgctgcacaggcaggctatctgcaaccatacagcctgttgccagaggatttgggttgtggtagctctggcacgatactggtcgctgttgattaggaagttcatcgagttttctgggcctccagccaatctagctacttgccatggaagattatttgtaatgtaggatattagattaaagatcttactaaatcctgaaccctaaaatagcggtctcgctaattagatacgggtcaacaatgatagatgtgttttcttggctcggtgttgatttctattgggcagacccagtccatcggcagttgcaacgagggctcgcaaacaccaaagtatatcgttatgcagtggccgcaatatatcgatccgcggaaaggaattttgggagcagttgtgggcagtcggtctcaaggagatggatcatgacagaatcatctctcacccgcaagtcacccgcttcgtggtcaactccatgcaccgaacaggtcttctccggcagtctcaatatgtgggattcgttgaggccgacgacgacaaggcgacaggtcttgctgccatggatttaggtttgaagaatgggtattagccaatgacgataaatgatgccgtgatacgggaaacgcagccaaagtcgacaaccatgccaatcaatcggccagggtaacatcaacattaattgaaactggggtaagaggaggacaggaatgagagggaagtgacaagtaagaagtcaaagatggacgttgcactccacggcattcgttatatctttcttatgcataggtttgtgggtttacaggctctacggaatagaggaatgggatgattccatactcttcagtaatcagcctctgctgtatgctcttttggatggatggcgcgcagggtctttttcacttgattggggcctttgtgcctgaaatttgcctggcacaaaagtaaggatacctgaattaccattacctacctgcgaatatgaagcctttggtaccatacaaatttaaatatctcaactttcttaggtggtttactggctctctccgttatgcgtaaagtaacttaaattaactctactattaccaataatagatatggttcaattccaaaacagtcatttaaatgctatatgatagagagaaaccaattgattagatacgaccggtattttatcataattgtagtgaaattgtagacttaaaattctttattgctggtaatcgtagtagtagtggtagataccatttgaattacttcatggtgatagttttatatttatatatgacggagagagctagtaaacgactggaaaagtcaagataggtaaatttgcatggtgccaaatgctctatgagacagctggcgtagatggaccctaactcggcagactcaagtccttgctttggctgaataaagcgcctgaatcgtcatatgtaactagatttactgcaacaggttggttatgctttgattggttgacgattgattgattggtgcaaattctaacaaataaccgaagtagccagatgaggcacagctcatgtttgcacggatgcttggtctataagctttttaactgactgagtcatacccgccagaatctttgtcatgagctcagccgtcatttcatcgcgaagcacgattcgcatgacttcgatgtcttctccatgtgctccccatccgcgaattgtataatctggaacaggtcaatggaagatacatcaatggagaaccggaagcgactgactcggaatagagaatttcaaatcgtgcattgcatcactgatatccgatagctgcaggttaggatactgtcgtcgggcctgatcactaagtctaaacaccgcaattgggagcacatgagtaacagcttgatcacttcccttacagagcgtataacctccacctgctttttgttgccgatgagcatcgcttaagcaataaaaataccccgtctcctccaagagtacactcaaacgacgagcccgatcgagcaggctctgggtcctatcctggtaccctgcaagccccaatcgaaggaagttataatattggccagcgataggtgcaccggatctcgagaagcttaaggagaaatcgctatgggttccccggagataagaagattcgactaggaggccttgtggaatctgtgatttttcgcgccaaagtatccatcctaccgcgagaggtgccatgccaaatttatgtcctgatgcattgatagattggactcgagaaagacgaaaatccctatcaggaacatattgtattagctagtaataatcgacggagggtagatgtatgtttaccagacgaagttcgtgttggtggaagtaaaaggtaaaatgaagccaccacttgcagcatcaatgtggatagggatattatttcctgttcgaagctcgtacgcgtccagtacgtttgcaacttgctgaactaaatcacaatgtccagtgtaggtagatcccatagtcaagaagacaccgactaagaaaagtcagcactagaacgatcaatgagactggcggcatatacttgtattttcatctaagcgatcttccaatccctcgatgtccagtgaatatccacttctctcactgacaggtatgatcctggcctcgacgtcaaaataaaacgcaaatttattgacgcaaacatgcgcatttgccccaattataacattgggacgagggtacaagtgattggggtgattcagctgccattctcgtttcatagcaaggccgccgaggaggacggattcagaagagcctgtcgttgctgcaccgaaaaagccatttggggcgttccaaagatttgcaagtatagagaggcatttttctcgatagctagttggaataaagtgtcttagatgatcttctcctgagtcataatcaggccaacaagaattactcactctgctaaggacggatactcatgaatgcatgcttggtttcgtagaccaccagagatcatgagatcgatagcagtctcatcgaacttggtagttgtgaatcttcatacatcagcaattctttcagttcaaaattgatcgttcagcaacttacctcccaagatcatgcgatggaggtatgtctgcggccataacattttctgcaaatgctctcacagtttcaaccgagagtcctctatcaggcatatagcccttagagggcagaggagtaggagatctattggaaggcatgttgagtagttgaaatgccaatatgtagtataaggttgcgtcgaatcaatgctgagtgtagtatccagacaaggggtactgcttcggtaacttatagaaacgtagattatagtcagatttcagagacttcatgacatctcccttaaaaaattagttcaaaaatattgctcccaatacatgacgcagatctcagaatctttgccacaatgctaacccccttaaaagctgtactacacaccatgtaatcactgtgtacaatatcatatgcaggttcgaaatattacgttatcacattaaacgtagatgacatcaatcttcttcgaggatgttagatcgcgcaacaatgataaaagatcgatttggagatcgatctagagatcgatttagactaacgccatttttagcgtgagatatgatcaggggttgtgtgtggaggggtctatttgtcatccaattacctcttacggtgatttgctgggtttgttttgccgggtgttggacagaccacatgagctttacaaagatcataagcgctgtggacataaaatcgagtttgaaatgacttaccatcgatggcgcaagagctgcatagactgcgggtcaacaagcgatgttcgaatggatactagaaacttggtacttggactgtatcatgctatttgcacccccagttacaatcagggaactttctaggtaattctgagaggcattgggcacacgagatgccttgtgcggataaatttcccgcaaactccttaatggtggatagccacaccatggaagaagaaggctaccctgcaaaggtcagtgaacgtaattgtaagtctatcatcccctgtatgaggtgattgaagcgtttgattgtgatctactcaagccgggcgacgatctcccgtatgagcactcgtgagcgtggcccacgacagatgacttccgcatctaggccatgatcgagacaattaaccaagagcgaacaaacgagagcaatcactggtattggttgatcagcaacctggaagttgtgttgttcacggatgcagattgcacagtttcagtgcattggataacttctccactgcaaggacgacgagacaattcttcctgaaagggcttcatacatgtctttgcgtcatggtagtcgcgtaataagtatttttcatccatatttgtcaagttcgaaccagatgctaagtgtacatgtagacagccaagaaacgaacgccttgctattgatcatagagacgtcatacaataagagataggcaagtgcttgaagatcaagatcgattcaatggtcggtgtaaagctatataaagtcgaggttcagactgggaaaccatcaattcaatcaatgtgctgctattgttgatgatctttcactatgactatcgcggaccacctctacaagacagatgatgagactcctcatgctttcgcaacttgccatcaagccaaactcagtgtggacaaatctcaatcaaatgacaaagtggcaacaatactagctgcttggtctgtgctgttgcgagactactatgcaccaaacactcccactttcagtcaccttcgaccgaaacacgaagggccttatgagaagaacaaggcctcatctggagatcttcagagtcaatgcctgtcaatttcaacgaacggtgatctcagtaccagacagttgaaagatgcagcgtcacaggctattgccgccgatgattggggagacttcactaccacgaaacagaagacggctgttttggagtttcccaatgaccaaacgaaaccccctctcgtggattttgagcagctcaaggtatggaaactcactggatattccaaatctccattagcgtgaatcagagctaataggtagtccaggttgaagtgctgctagtcattagtactcaacaagacagcatatcagcaaatgtgtacatcaacagctccaaaagaccagagctcaaaccatgcgccatactgaaaagcctccagattatacacaaaaccctgacgagcgagtcgtgcatcaaagttgataaaataatcaccatcacgccattcgacattgaaaggctgcacgagattaacacaatgaaccccgaacaaaatgctcgtccagaatgtctccataccctcatcactagacaatgctcccgacaaccagcaagcattgcactggaatcaatcacgcaaaagattacatacgaagaactgggaaaacaatctgctactatctggaaggttctgatgcacaaaggcatcttaccaggagaaacggttggactctgcatgaacagatcagtttcaacaatcatcatcatgatcggaatattgagagcaggtgctgcgtacaatccgatagacccgtcgtctcccctggaaagaatctcccaagttatcaaaagcgccaatgttcaacatctggtgaccgatgaaatgctgcttgataggttcaaggacgtcggggcaaatctgatcatcacaccgaaggattttgagaatgcagagtgcccagaagactggcaggaagacaccaacatcgatgcttcaaattcagcctatgtcatcttcacttctggcagtacgggagttccgaagggcgtcatccatggccacggatcagtctctcttagcctttcggaatgtattgaaaagctccagattgattcttctaccaggttcatgcaatccgcaagtcttgcattcgatgctagtatactggaagtttttgccccgctagctgctggtggatgtctctgtatgatttcacaggaagagcgcaacgctgacctggaatcaacgatgcataagctccaagtgtcgcatgcctggctcaccccatcaatggtaccacacatccagccagagagcctcccaacccttcgaagccttggactcggaggtgaggccccaaccgctgaaattttatcgacatggggcgagaaagtccagttgaataacatgtacggtaccaccgaatctggagtctgggatacagtgaaaactggagtaaagccgggtgacaacccgaaaaatgttggacggagcatcggcaatgttgcatgctggatcacagatccttccaatgtgcacaaattgatgcctgtcggtgcagaaggagaactgttgatacaaagtccatatctgacacttggatatctcaacgactctgatcgtcaggccaaagccttcgtgacaccctcatccctggaatgggcttccctaatgcctccaatcaaaggatcccaggtatatcgaacgggagatctggcgaaatacgatgaaaatggcgaggtgattctcttaggtcgccaaagcggctacgtcaaaatccgaggtttgcgtgtggacttgggagagattgagaatgcaataaattcatgcattaaggttggccgctctgcggtggttctatacggacgtgaagccatggataccgaaattgtggcgttcattgaaacatgcgatgaccagaaaatccaactagctgaaacgctttctgggcaactgtctgaatctctacctcaatatatgattcccactgcttatgtgcaagtcgatacattgccgcagacgttatcgaagaagatcgaccgacagaaactccgaattcatctatcacagatgagccagaaagactttcggagatgtcgcagtggtagctcgtcggacgaagaattttccgaaatcccagaacaggagaatatggccaacgaaatcagcaatatcattgcagacataatcgagaagaaagacgaggagtttgcatcttctatccggggtcggaacttttcccttgcaagagctggcctcacatccatgcaattggtgacactcctgaacgtgattcggaagcgatatgagaagaaactcaacatagaaacattggctaaagatgtgactgtttgcaacattgcagacagtctcacgggaagaatcaatatgagacccaaaaacagtccccctaggaatctgattgccgatctcgcaaacttgaactcaaagcttgacttcatccagactcgcttagcgactgtctttctgacatctatcaccggatttctcggcagccagatcttgcgggctctgctggaatgtcctgaaatcggatgtgtgattggacttgttcgtgccaaggatgaaaaagaggcacgcagaaaggtccaggagtatggcgagcttggtcagtggtggcagccaagctatcaggatcgccttgaagtctggacaggagacttaagcagaccgaagcttggattggaggagaccaaatgggacagtctgttaacaacacacccaacaaaacgagttgactgcatcatacacaatggcgctcgagtgaattggatggattgctatgaggatctcgagaaggtcaacgtccaaagcaccattgaaatcctcgccggtctttctaaaatgaattatccctgcagattgatctacgtctcgggtggatacatgccaacagagacagagagtcataccgaaatcgccagaaagctctccgaggcatcagggtatgatcagacaaagttcatgtcccagttgctgttggccgagtacaacagatacttggatcgggaaaccatcaaaagccaaaaagctcagactgtgataccaggattcattgtcgggaccaagaaagaaggaatcgcgcaaccagaggatttcttttggcgactggccttcactattacacgtctgaaagccgtcagtgacaaactcgattatctgacggttgcgggagtggatcaagtatcccgtctcattacagatgcattcttgcagccggaaagatatacctccgaagcgattcattgcaccgatggagtagaattctccacattctgcgattctctcagcaagctgacgggatgtccaatcgataggatggaacatgacaaatggatgagactactgcaagccgatgtcgaagaagcagactttgatcatccgttcaccccggtgctgaaatggtttcaggagaacacttggcagtttatggtcgcgcaagacgatatcccgaagaattgttatttcgacaagaacgaaatcgtcctggccctggagagcagcttgagatatttgttggatatcggatatttctcacacgatgaggacaaggaaaatcgattgtcgagagcccctatcttcagccgatccaggtcctgacagattcatttgatcgtagatagcactccgaattctgccttatttgggccaatttgattttttctgccatgtattctgccacgtattctgcctacttctagtttatatagtaaaaagacatgcattttgatcagaaaaaatcatgtattttgcctgattcctgtaggatataaccccttgatggatgaaatatttgatgataaagcagttgatgacgaagttactgatggtgaagtagttgaggaagttgatggtgaagtagttgaggaagttgacgataaacagttgatacaagatatggcaggtgtgacttaattttgttaggagctcatgtacgaactgcgggtacctgctgtcttggctactaactataatatgcaatttgatacaaaagcggtgtacagattagcaggtactcaaacaaattaggaaggcggtactgagcaacagggaaggtgcgagcaacaattccccggtaagacctggctcttgacaccctccaggtggccgaaagacttgctcaccagataaagggttcgacgacatggtggtttcaaaaggttgggagacgagaaagaaaagacagagcaaagaattgggcttaagttcttagatacaaacaatgatagtatttatataacagccactcccacattccccgtccccaaagatagtggctctaccacaaaatgccaccatcaagatggggaaaaaaacgagagaaaatgaaatcgagagagggttcatactcacactagtctcaacaccaatttccttatggccgtccaatagcacaaacgcaacaattatcaaaacccccaccgatgaagccacgcccccatccattcctctttgatagcaccacatttcgttaaaggtaaccgctttttgctcaaagtagtatccataacaacagatctctgattggcggatatcagcccctggaagaaaccaaggagacttataccacagacaggtgatcgggagctttcatgactgcgagccttgtcttctaaaatgtctacccacttctgcagggtaacaacctcgagaggctctgtcgagcgaagtcgctgggccagaaatggcacgaactccgtgaaaggtacatgggttgggttcacgatgtgatagtatctggattggggagcctcatgattctctccactaggagcattcgagtcacacacaaggtcggacaaagcctcagcggcaatgtcaaccggcacccaatcaatctgattcgcagagccaagactatctggaatacacccaagctctaccgagctggctaggaatgttgggaaccagtcgcgtcgtggccatggcttttctgcactctgctctttggtcggtccggaaatctgcccaaggcggcagattgtagttggtagattggtcagctcagttgctcggtcgagcagtaagcttgcaatgagtttgctttgtccataacctgtctgggcaagttctgcaaaggcgagcttggcttccggaatgggttccgacttttgccaatttttgacagtagccaccgaggagagaaagatgatctgcactttgtgcttggcatcacaggcaaatttaatcagattactgacacctttgatgtttgtctcgaaggatttgagtgggaggttgaagtttacttcccattggcaatgaaggatatccgttacgtctgccgaaagatcatgatatatgagatctggaattccaaagtgaggctctgtcagatttgcctccagctgctcacactgagcagtactgccttctcttaggactgtttgaatggttggctttgagtcgggggactttctgttgacgcaggttacctttctcacatgtttctggcgcaacagagcctccaaggtgtgtgacccaatgaaaccagttgtcccggttagaagaacatgtttactggttggcctgttccgcttggtcgttgtggcagtagtggcagttgggatttcgtgtgaatatctagacctcagatcagaatatattcccatcttgaagagaaccgcaacctgcctctgccatatttcatcaaaattttcttgatccccggactcgcgaaataatgctgaaaggcttcgcaaaatagaccttccaagaagaagtagcgttggattgccatatatggtgcctatctcgaccttccaccccacatcaatgtcatgcacaggctgagatgcaagtttgttgttgattgcagccgtgagcatctgcgcttgctttgagtccattccagcagcaaatatgtcatcatctgtacccaagtgagatgtatttggtaaaatcttcgctatgaggtgggcaagaccagaagtcagagactcttcggatgtcaaatcgaggtccaagtcatctaggttaggttgactagggatagagtgagagctatatagctcatcaatctcggtcttgtattgctcaaggcttttgttgcggtaaattgttccttttggtgttcgaacaaatggcttctctttattggcaataagaatcatggactcgtggatatgactgtcacggctgctgtttgaattttccatatccaaggcgtctttcacactattcttcaccttggatgaaagatttgagtaagagggttctgccttgtttataccttccacctcgagtattaggcccggatagcgttgcttgtttccgatcacaagagcggctttaataccgggaatacatcctaatcggctctcgataccaactggattcatcttttctccagtagagaaaacaatgatgtcgtcaatcctgaacccgtatttccacaagtctggttcagtcggatgctttttgaagacatctttggtgtgccattcgttcagctcaggaaaattgtgaaacacactttgatacgactcaagggaacggtcacgacgaatgaccatttcaaattcaggttcgtttccttctgcctctgggtctattggtcgccaatgaatgccattcaagggatggaaatgaaaataattccaatgtgacggatcattcgaatattgaatgaaagatccacattcagtggaacccagtccattgaagagttgtgtcttggtgacaaccgtgtcccctttcttttgactgatggaacctacagacatggtactgtcagctaccgttcatcccttagggtcaaaacagcctaccccctccagtgaatatccatttgaacttggatgcagagttcattgcctctagattttctgatagctcttcaacaattgacggtggaagaagagctccatctaattgagaatctctcatcgcaatttgaagcatcaatatactcggtggccggtggtagtatccaaacatcaacgtggttccggagaacagaagataggagcttagcgcgaatcccgcaacatgaaacaggggaaatgcgacatagacggttctggcatctgacattatctctagctggcacttccttcctttcgggtcttgttgagagattagtcgctgggcgtcggaagcagccaatgaagaatggctgattggcacgagtctgggtattccagttgagccggaagtatgcagaatcttgtcaaagtcagattatgtactagaactgaatcctttccacgggtcttaccactgctggagtcgagcgaagtgtggcccatgacccatcatatggatagttctttatctgcttgggtcctcgaagtagttccactaagtcctgaatttgaaaagtctgtatgcttcttgtttttgagatctcatctaccgtggaagaaaatgtcgactcaaagaccatgaccgggctattcgacagttctaggagatatcgagccattgagatgctgaccctaggagaaatcaagagggcctgatctcacttataagctttgacattacttggaagtagtgaacgcggattgcgtacctgtttccccatcttcgtggcaacgagagagatcaaaagatgtctgaggtcacttggtcctaaatagctgataacactgttagaatcgaggctatatttagattctttagaagtagcgatacgtacgcaatgactgttgagccgttgggcttgatagcgaggttatcaagttgccaggataaatagtttatcgcattgaacagaccaaggtacgaaacaataacctcatgtggctgattgggctctgcatgctctggctgaataagttgttgaatagctgtcttgtcaggactatttgaagctgttgcctcaatatagttgagcaaaattcgactacctactcgactctcaccgtgttgggtggtacattgcttatttgatgcagccatgactttgataattcacaatcagagtgagaatgataatgataaccgagttactatttggattttgtgactgacatgcttctgtttatagacacgctgctgatcaggtcacgtaatttgtattcttggaaaaagcaagacttatagccaccatgtcataagccatgtgatctttttgactcgatgtcttgtaagaaatcttacatcatttgtccaacttgatcacagactcgatcgtcgcctatctacgatggcgaacattaaattcaaatgcgcatgcgcatacgtatgaacacgaaatagtggggtttaaatatgcatcgtaaccccatgctacaaacttctatgtagtagaagtgagtcatggcgcaagtgtgtacgaggatactccgtcagactgcatctaagcttgaaccttagaaatggttccgtggctgcttctataaaagaccagtggggcttgcaagaatcctgatgatatctcttcaattattctactcacgaagaatacacacattagaacaacaacttacttttttaagatggaacacacactgtgcgtctttcgtggatctagtgacggcaagttgatccaagatgtgatcaaaagatcatttggctccaatgatgttcttcttgaaatgacacacgcaagtatatgcgggacagatgatttgtttttgcactcgccccaagtgctcggccatgagggtgtgggtgttgtcagagagaaaggccccaatgtgacgtcagtcaatgttggtgaccgtgttggcgttggttatatccagtacgtgtgtgggcaatgtgacaattgtacttcaggtaatttcttgtgttttctgtaaagcccgagaagttccgcagttgaccttgttatccaggctggaaccaatattgcttccgcagacaacgctatggggccgatgaccctcaacaaggttgtcttgggaaccaagttatttgggacgcaagtggcctcatttgcatcccggagaaatgcagctctgccaatgccgctgcactcatgtgcggtggagccactgcttggacagtcttgacacgctataatattcggcgcgagcagcgcgtgggtattattggaatcggtggcatgggccaccttgcagtaaagctatctgcagccttggggtaccatacagttgttttttctcgctcgaattccaagaggaatgattgcatggcgttcggggccaaagagttccacgttcttcccaaggatactgcggtgaaggaatggtacacgactgacactgcaaaatcattttatgggaaagtcaagcctgtggatcatttactcctgtgcagcaatacatcggaggactttgccatgctcatgaatttggtggctactcacggtactatctatcccttgacagtgagtcttgattctgttccagtgccattactggccatgatcgacaacgcaaccagcatacaaggatccctgacggcatcaacggaagacatctccagcttgttggagttttgcgctgcgaatgatattcacccgatggccgaaggccagttcctagaccaaactggtgttgaagctgcttttcatgcgttgaaggaaggatcggtgcgatacaagactgttttggagaaaaagtcagtttgctagatagcttggaactaagtatacattttattttagtctaccgtcctcgcgacccgttccgatttattacaaatttgtattttatattgccaatgaagatttcatttctcagtccgacgccgtccggtgggccgatctaaccaatctatgttgattgtttaactagtcttgcccctggaatagactctggaagtatctttcaactgaagttggtatgacttcgggaaagaggtcattgtgcagttgaccaggaggtctccaaaatctaccttgaccttgcacatatcgtaacaaaatccaaaaatcaacagggaaggtgcttcctttctgaagcttttccggcgcggacgatggattttcgagtatccttttggcctggtcgacggaagttgggttgattcgagctggctttctggagtaatgacgcagaagtcgagtgatctcgttgtaagagatataatcacttcggaatcccaagatcttattctcggatctctctggatggttgatgctggccacgaggtatttggcgacatcttcacaagaggagtagtccatttttgcgtctgggtctcccacgcactgaacctcatagccatcattcgtgatagcctgatctttttccaaccagggacaaagaattaactcgtcctgtacatcaaagagctcagcgcacccaataacggtgtaggtcatatggccactctgaattgcggggtgcttgattgcattgtcaaggcatctcatttttgcggcccagatctaatcaaaatgttagagcatgaagccagaagacgatggaacttaagagacttaccggatgtagatatgccccttcgccttcaaaccaaggtatctggtgcattccgaattcgctcggatagaatcgtcgaactcctgccattgcagccgcgtcttgaataacaccttgtttgttgataacttcacaaccaagcgtgctaacaacaacactgacatcatggctggccatgatctctgcaaggtcattgctagtgacgatgttgaggtctactctcttttcgatggtattcgcctcatcaaagtcgccgacttgaaaatcagaatttggagaaacgaaggcaaggactttcatttgtgcctctttcgactcattcagtgctttcaaaacgtgtcttccgatctggccattggctccaaacaaagcaacagtgtagaatggggtaatcatgatgaatagatcctggaggttgactttgttggccgatagaagagtgatttagtagttgatatttcggtaaggtagaggtaacagtgttgaagtacttttttgattctacttgaatagatctgaaaagggagtgtacgtgtattaggggtagtacgaacgccatgtatgtgatggtggcaaaccctcttcggacattcctgcaagtgaggcgagcccaatttcttggataatatgcattgaacggtgagaaaccgttgataccatcaaataatttgccgatctctgtcatatatttggaataccaagctctcaaatggggtatgacatactaggagctgaccttgcggcaagcgcgcactatcgacttccgaaatgatgtggagaccagcgctgtgtgcatagcaggtttctcgcctatgtatgatctatactaaatcgagaattggtatctccccctatgtctgggcgttatctgctgacgatcccgttcatagcagaatactctatctgctgaaacacttacatggttttcttttaccattgtccaatgtggtctgtgtctgggttttgagcttgcttaggtccggtatctgacggtcattgttcacatacataggattgatagggcgagggcaaaatggcaatctttgatttcgttggcaatttggctatactgttgactcgaaagactagtacataattgatttaatgagactcaatgcgcacacaagtagaaacctccaagctatcctgtctaaagttagcatattattcattcaacaacgacgatagtttactcacaggctctcctgtgggctcaaagctgtctatcagtgtgttttcatatactagatatggattaccaaaagacttgttcgccatcactttgatatcgaatgagtcctgttcctgttgcatcttgatgactttctgacttgtggtggattgtacgtattccaagtagtcgggaacaccgggagagatcacattgtcggcaatgacagtagtgccaggaccaatgagaccgagctcttcgcagagcttcaagtcattgacatactcccgcttagcatggtcaatgaagaaaccatcaacagcaccggtagagtattcttgtcgcagttttcggagagattctcgacaaggaccgacgcggatttcgacaatgtcgtccaactcggccagctcaacaagcgcactggatatagcagcaaatttagagcttgcctcaaggctcaaatactttcgaccgctggtcttctttagggcagcaccaaaaagcaaagttgagtagcccacgtagccgcctatttcgaccatgagatcaggctggagtttgggaatcaagtcttgagccacaattttccctttttcgatgccgacattcatcagaaagtcggttgttcgaccatactcatcaattgcagccaggattctctcggggtttccctgcatctcgtgatatccagcatgagcgcggataaattccagaagtcgctcttctcggccatcgtcatgctgatgagttgtcagaaagaacgtccagtcctgaagaaaatgaaaaatgagaacatacgaatataacctgctcaggcttatagaaagaaattggatcttttgtcatgatggtttgttctcaaaaattcggtttggtgtgtttgtgagataggtgaagaccggccaggcgagtcgaaggataatttgagacgtgctgcaggaattatatattgttctcctgcgagctggacactgcttactagtgacttcgatcaagtttcaattatctcacgtcatgtgttgtgacagtcttcattttcccgctctgacatcttgcccatactacttggccttgatttggtttttgtgatttgaaatttccaattgcatctgggaaacggtccttgcaagatgcaaggatagcatatcttgtggctcctcaagtacgttcatttgatggcgaggaaagtgcgcactctatcaagtccgccaatcgagatcgaggagtaaatatgttgcaaagtgcaggttccactcacacaaataagcccgatctcgggcatattcaaaaaggtttcacaacatcggcttggcacggaggtcaatatcccctccacgcatgaagactccgattcgaatcatcacaactatgtatcaagataggtagcactacgctcgggttgagcagcctgcctagcagccaacagctcgatgccgaccttccctgattttgatgatttcagccctaattaggaccagtacagactgacagaaatcgagcatttctgtgtcagtgcctaaataatgattataagaggatcattttacaatacacagtaacaccataggcgacttatattattttcagggctggactatcgaaatctgacatgccccagcatggcgtttgattggctggatcggtgaactcggatcgcgctacgcaatttcatcctctaacgacatgaagcgtgggcaaagaatctccttggcatcgaaaatattgatcgttggctttgaatcattgctgatttgctatcttcgcagcttttactagagcttcttaggttgaaccagacaacaagaatctttaaaaacttccgtggtagctattgtgattgggaaactgtctttgttctgaaaaagattatagcgttgggggccatttcaaaatacaaaaaaagactcgtgtgtgggatctagtgcatcacctggattgccttggacatcggaatggtagccctcccatcagcaatagccatgtaaatcttcgtaatgtttgttccgatcgtctccttctctcttctgctgtcatcaacaccgccccccaaaaagccagggtgatcaaccaaaccccgatgaaatggaacctgtaaagcgtgtcgtatccatatatgcatctccctcgttgctggtgccaagtatttgggggtagattgacaggccaagaactgtttgcttgtattttgatgatcttcaatcaacgtcaatgtaacatcggttgtccatttcgggattaatgcatatgaagatgggtctgtatcggtgcgagtgtaatgatcaaaaatcaaatgtgcagaatctcgtgccacctcttcacatcgactctctgtctcagattgattgtgtctatgccaggaatctgtgattcccatccatagatcatcgaatgccacagcacggtcggttttgggccagatcttcttgtgaagcgcagacagatgtggctttgctatgtcaaagaaatcctgattcaaggcacgtagatcaagtgcttggcaaaggacatagaaatgtgctgcacacatcattgtcaagatatcaaccgagttggcagtatatctagcagcaacaagagctagcgagttgactgattggttgttcatttcggcaacttgcacatggctaacaacagagttgccaaggtatgccagttccgaaagataagcagacatgttgatatcgactcctttgcaagtgaaagagaggctaggatcatcgaagcaaagattaggtggcaaacccttgttgagaattggatttataatttcctggcattgtgaggctactagtcgtccaagcatgacgatcgcagtcttggtcttttccatggcacttgacacagacgcagcctgaaagttgccaccgtggtggaaacggtctcccgctacatcgataagaggattatcggtagatgagttcagttcagtcgtcacctgtctatccgcgagcatgagatcttcaagcagaggaccaatccactgaggtgccgtacgcaatgcgtaccgatcctgtacgaggccttgctgtttgacgttcattttggtgcttaggtgagacccaatgagaaatgatcggatgttatcagccacctcaatttgtccaggatgtggccgacattgagaaatgaagtcatggtagttgtcaagtgagccttggagggcttccgtcgccatcgcggtcagtagttgcacaagaaccccaagattatgagcatcatgtagcaccagtgcggcagcggcggcgctcggagcagttccgttcattattccaagagcttcttttgcgtccattgtcacgggtgcaatatctgcctgacgcaatgcatctgcagccgacatcactgcctcgagagtctcacccttgacctgcacggatatccctgtatttccctcaaggagcccaccaacataggaaagtggagataggtcaccggacgccgaaatactgcctctcaagggaataataggcgtaattcccttgtttagcgcttggatcagcagttcgatcttgtccattcccacggcggaatgaccccggatgagcgagttacaacgcaataaaattgcgcctcgtgtcacatcctccggtaatgcgtaggccctgtcgtggctttgggggagacccggtagaattccagcctgatgatgttgcagaaatccttgttgtagtattttgagtttcttcgttcgcttgttggcatttccaccacatccagtattgactcctgcaaaaatcgataatcagtacgcattcaattgagatcccaatttatagtttaccgtagatgtcctccccattgttcaggtggatgttaagtgtgtcaatactctcctgcacacgtttctcgattgaaccagatttcgacaaagagacaatcaccgaaaatctagtaaagaaatattagacctgcaatgtgacacacatcaagctagtagatggactagtatacctggccactgcaacaagctgtgccggctccagcgagttctgatcgccactcaatattacgctttcggtttctcttgtcttctcgagaagactccaggctcgttgaacatgttccaggtgtctcatcatcgtgtactgtttcctttcgacagctagggctcatataaagttggtctcgacacaaatgatctgatgaagccttggtggtttttgaattgcaagataggccagacttttcactccttatgtagattgccattccgcgctaaggggaccgcgatggagcctaactgatccacatgcctcaatgggcttgtttcacaagtcacgtatagtatcatcataatgccatcatcatgcgagggggcttgttgggttcttgcagtctcatgacttgggctctgcctgcagcttgcataatgatgtggcaatgagatatcgagtttagattccaactatttcaggatttacacagctgattaatatactaaatttatatgtcctcgagatatatatacctacatatctacttgaaacacgattgcagtaccctctaatctagtgatactcaagtccaatctcaatatgacacagaatacactaagcaccgatgttctcattatcggcgctggtcctgcagggtatgctttgttgtccaagaaacaaaagtcctactgaccatccaccctaggctcatggccggtacatggatggcacaaacaggaataaaggcaatgatcattgataaaatgccatgcagaactcagcgtgggcatgcagacggtattgaaagtcgaaccttcgagatacttgatagttttgggatggcagatagcatatggaaacatgccaaccgcacaatcgacctatctatttgggtaagtactggatctaatcatttcttgttttattatatagatatctcctatccttaccctagcttagtagatgagatttattcgctttttctgattattgactgactgtgcgagaatagaatgactgtgaatctgatggaattcagcggcaatgtatctcaaataactgtactccaggcctctctagatttcaagaagcaacattgggccaaggtcagatcgaagaaaatttcattgactttattcaagagtcgagctcggttgaagtgaagtggaactcatatccagtcgatttgaatatgtgcgaggggtcagattatcctgttcgagtgactgttgagatgagaacatctgaaagggaggtacgccaaattgaactacccatatattggccctcctatcaactttttttctaatgagaaattagcagacatcttatactgtcaattcaaagtaccttattgcgtgcgatggagcgcacagctggattagaacggctcttgggctcaaacttgagggtgaccaaacggatgaaaagtggggagtgattgatttgatacctctcacggactttcgtaagctttgaaatctctcttacaaatacagtataaggaacacttgctgataaaccctcagctgacatccgcaagcgatgcattgtgaagtctgattatagccagttaatgataatcccacgggagcgaaggcttgttcgatgttacgtccaattgccacatgaagtagctgcagtgctctggaaggaagtggatcctgcgttactggtaaacattgtgaagaagattttaagccctcacaccttcgaggcctcgaatattgaatggtcaaccatctacactgtgcgtaaatccacaaacactacatgcggtgattatttctaacttttactgttctcctaggttgggcagagactgtgtaccactctttcgatgtacaaccgagttttcttagctggtgatgccatacatacccattcaccgaaagcgggccagggcatgaatgtcagcattcaagacacgtacaacctgggctggaagctagcatccgtcatcaaagggaaggccaagtccagcattctacacacatatcaaaccgaacgccttcaaatagcaattcggctaattgaattcgacaagaggatggtccagggagtctttcagatggactcggcctcttctgtggagaatgcctcatcgatgagcaaccagatgcaagacactcttgaggaagagaatggatccgcatcaggagtcactgccctctataaacctagctgcttgatcacacgatcgtgggattcgaagggtcaccagttggttcgtcctttgctgccctatagcaagattgagctagccgggaaattggctgttggtgccagactgcccaatactcaagtcttgtttcaatgcgattccaggccttggtctctacaaagggttcttcgcagcactggagagtggcacctttttatttttggtggtgacgtctcgatcaacacacaaatgacacgcgtcaaacgactagcatctgagctttcccgagatgagaccttggtcaacagaatcaatcaacgagaccatgattgtgtcggcaaaatctcaacgtacctagttcactgtgcacctcggaaaagcgtcgacttaatggaattgccaaaactattcataccattcgatgaaaatttgggttatgactactggcgcgtgttcgctgacgaggaactgtactccgaaaagcgaggtagggcatatcaacaatatggaatcggggcggagggatgtaccgtgctggttcggcccgatcaacacgtcgctttgatcgggactctggatgatttcgccgcgattgagctatttttgggtaatttcatgactctagtgtagatactaattcttctcatacacattcgagcttttttgcgacaaataaaccaatgataaagtggtagctgcggtctgaggatggttcaggttgtcctgaatcttagattcgcaatattcacatgggattggacctcgaaactccatgttcattctgttcatctttcgtctcacattccaaggtttagggttgtacctacacgttagctaatcttactgctatacctaggtagacccgcagactcatagaatcaagatcaacaggaagaccagggcgagatgaaccttcggggatctagctttatggcaccgaatttcataccggcgaaataattcctccgagcacagtcatacacagtattaacgtcttcagctcttttaggatgtaatttactgcgatcaccgcccccgagcagcgaaatcgaggatcatgaggactctatggtacaaatcaaagagtgcatcagtcaagcctcctcggaaactcagcgttactaatattgagacatgttgccagctgcatgctccatgcttgtggtcggcgccatgttgcctttcaaatttaccacatcgtcactgcagttcaacacggcgtattgaggcaggtatgcaactcatggaggccggttgtgtatagtagcgaagacaggcggtatttttcttcggaagacaaccacgaaatattgaagatccgagatgctgatctgcaacgaatgggaggtaaaagaggctattggctagtcgaaaatcctgagcatggtgatgttgtgtcccggatccgatcagaatttatggatatcctgagcgtactctgtcaccggaatcaggaagtagtagtaggtgctcaaccaagttgggaaggcgtggaagttgctatccaggagtgcgagcaacaattccctaaatataagactcagatatatcttctctcattatacaactatgaccagttggacaaagggcgcataagagcctgcacacctcacgtcatcagtaattcagtcttgaaatgtttctcaagggtagtgaggctaagcactcctggccttgcatttggtgtgagcgtattatatgatgattcgtcaagcaaggtgggtgaaatgaggggtctcacctatattgtatacatatggtatgtgtgtagcctgccgatctcttctattctccatggtaacaaacgaattctcattggcacacttgtcgataaaatgggtagtatcgtagccccagcttctggtttacttaatccttgatttggacatatacttagcaaggcgaggtagcttcactatggagaggtatatgaatcgtcaaatattgtgagaaccaaaccaagtctaggctaatgaactatctagcttcaggttttacacagctcctcttatgcctcatgccaggcgtagtctcgactctccacgtggcacctcacgaatcttgtcttatattaattataatttgggattaattcgggtatgagaagggcaaaagggaaccttttgacccggatttccttgtttagtagatcatagcttcacctgataagagttcttcctcctcatcaccttgctgagctggagacatgtctcgatttcccgaattcaacaatgtaaagtacaaccgtggagactgcaaccttgtagaaatgctcgtataatcgaggaagaaacgcggcaatccaatatcatcggtctatcatacagaagtgcaagcgctagtgaacgacaatctcatttgaaagatggtaatcgtcagagagcagcgaaaaagcaagtgacagcgtaagcgacagtcaagagagtaatggtaacataaagcaatacaatgattagatgtatgagacaataggaatagaaaagcaaaatgaacaagcacgcataactaaataaatcctaaccagacaccagcatcaggagtctccctaaaacaaacccagaacctttcccgaacccatccatacccaagacaatccctagtccaaccctctatctattccatggatgcagttcctcatctgatcgtgtctcggtagtgtcacccgcaagcatttaacaaaagaaaatggggttgcaagggcaagatgacatcttgaaacaaaacaataaatcgcagatttgaaacacgatcagaccgtccgactccttccagtgcgctggttcccatcaatataaatacaaacggaataagaaaatgcatgaaaaacaaaggaaaataagaaatcaatcgagaggcatagatgtattctctcgtgggaatcaagggcttatgcaatgaggttattaaacaaaggaaataacggaaaattcaagctgttgcgagacacttgtgtcggttgtgaatcgcatcatacagcagtagaccatgtgtggtcacctcgaggtttcatttcgtagttctccggctcggtgctggtaggccgacgaatggtagagttgggaaaatacatgtgcggcggcattgatgtcggatacgcggggccagtgggctcagggtaagtgaagtcgttggctgacccgggcgatggcatgccaccgtgagaaggcgaggcccatccaagactagtcatgtgcggactgccattcacgctattaggacggtgatcactgttggctggaggctcaagaggttgaggcagaccgtagggatgcgatgtcatggatggccggttgtggggcgcactgccgtagctggacagcgaaggagatgtcgcagtcggggaagctcgggggctcccttgggggaaatccccacgcacatgaggcgggatagggccgttgcccatgtagtagtcgccggcagagcggtgcatgttcagcggcgggagctcaccaccaggtgacatggacgggtgatgcgcgggtgacggggtagaatggatggaagcgtgctcggaaaacattccttcgccaggacgtccacggtccttattttgtcgcaattgggcctctgtctcagcagcagcttcttcgatagtcccggtgtggtgattttggtggcgtgtcaacgtcgtgcggcgcgtgaaggtcttctgacagttggcatacgggcatttgtagggtcgcttgccagagtgaatgcggcgatgtctggccagcgaagatgagtcgctgaagggctgaatcaatgttagatttagccagaacaaaaagaggaaagttacacaccttgccacatctctcacacatgtggggtttctctccggtgtgtacacgggagtgcactgtcaaggccgagcgttgaatgaactgctttccacaccctggccactcgcaagcgtgaggtctaactcctgtatgaatacgctctgtgaatcattagcggccgcatctccaaagtttccgaaggatacataccatgtcgagcaaggtcgctacgccgtgcgaagcccttgttgcaggttgagcagtggaaagtctttggtggtgggtcaatacctgctcttccttgtggagcaggttcctgctgcatctggggatcgccagcgtatcccgcaggggcataggccatgtttcgaggggttgaacccgtaggctgtgcataatagaaggaatcgggaagtccaccatccatttgcatgggcgggggaccgtgaggaggatatacattgacgggattttccgggccacctgattcgctcttcatggtgggtgaagctccggtgtgcaactgggcactatgttggaagtactgctgttgtaactgcgcctcagcggcggcggcggctgcagcggagtttttcctgttcaggatggtcgtgaagtccatgacccgacccagcaagtagccaagggaccgcggtcaaggactgctttcgaagacgtccttcggcagaccttccacgcgactagtattccgatgaagtccgatagcttattggattcggagtccttgacgcgttaggacgtaaatgaacagtggaggccgttgggtgggagattcgggtcacaactagcaagctctgcaagtcacggtataattagaaccaatcttcggtacagtagatcgagctcgattctgcagaaactccgcgagtgcgcagctcgtgggaagaccttagaccagaaactcaccctgcgtagacctgtatcgtcttggacagtccctcggcgaagaatgcgacggggtaaattctccacttttctgcagtggaatgcaaggttgcgtaagaggtatcgaacgatgggctttctgccaaaaaaagccaagctcgtctcagagaataatgttgtggtcggctcaaggcggaacgcgtggtcgtttgtcggtgaaggtggaggaagataggtcaactatccctgtggaggttcctatgcaacacaagaaatgtcgatggtcagcatgaaactaatatcaagacgatggttgcgatgccgagtattttccaccgccgtgctgtaagctgattttctcgcctatgctccgcggtcctcggtacgggagaccagtcacaacgccgagttccaggaaaacgaaaaaagaccagaccagcacgtatggggaaattgtccgtgttcacgaaacccaagataacagcgcatggcggagagagttgggcagccaaggcgaacaggcgggatgcgtcatcactggcaaatcgcggtgaaggcaaggagtgaagcgggaaacacacctttttcaacgaagcttgaggtttcaagatactagaatagagaagagtcgagggcgacacaaagagtggctcgagagaatttaggaatttgcggccgggtcaagtggggttaagaaggtagagagacaaagagatcaagaagattggagatgaaatgaaagaagaagaaagggaagcgaagggttaaaaagtagaagatgagaaagggggggggggaggagaaataggaaatattatgattattacatgtttaggtgatttaggtgtggtaggtgccactgtctcttgcatctttgtacatcatttatttacacttggagaacttatttttggcgctctcgtagtatttgtgtattatcttcgtgtcttattatcccggtttcaaatcggacttctgatcctatatggcgtttccatctacatcccacggttgtgctgctatatcagttgcaatccattcagacctctcctaagctgaattccctttctagaaggactagtcttcctagtcggacccagcgaagcccgctagaaggaaacctgaccgcaccagaaggatccacaacgtgcccttctccccgtgtggaaatggatccaaaaggccgatccgaacctgagtttccttgtgattattattatccgcctcgatatagcctcctgaaatttaatctctaaatataccctggagggtggtgtttattcccaggccatggctcaaattaagcataggatcgggctaataaggaaccagatcccaatgttgtaatatacggtgtagcaatgcgttaatagagtcccatatacagtatgaaagggggggggaggggccgaactacaactgacaacccctgaagcgaaatagaaaatacacgcatttctcatccggattttacgattacgataaaaacacaaagaataaaaaagaaaaaggaaggaagggaaaaggcaaaaaggaaaagaaacaggagacatcgatcaacgatgacatgcaagtttctcatggtgcgacacattgagtgatatacttatttttatacgatgcgaaggagattacctcgataatctacccggctgttagccggaaacatcgcaaaatcgagattgaccttctagaacagttccgctatcacaatggtaaccattcctgtacgtacctcacgccgcatatatgggttacacggttggtaggaccaactgacttcgacctgctgttcttctctctgtttcccctcttcttttcttaggtacgcggactctgacgatcctgcagtggagctaatccggtctgcatcggtaattactcaacccctttcccttccggggcctggcttcagcctctgggaatccactccactgccacaaaaagacccgtggacggcacggatggctctgccaagccttctcctgaccttccagaaggacgccagaagcattttggaacatccgtagaagccgtggaagccgtagaaggaaaaaaaaaaagacatgcgcggcgccccgtcctgcgcacggttcggagccttaccaggagatcatccctggctgtgcactatacccttcacatcgaagaattaatgtacgaaaaaaattaaacagagccatgtatctgcctagaggcaaaacaaaatgaaacttgaaaaaaaagggggggttgggcaccaggatgactggtccagtcatatcttgccaggtgacttttcagggctattcctcttcattggcatgatcgtctatcctcttacgctccctctcacacacacacacacctaccattatgtgcccctcgccgggctaatgcacaccctagtaactgtgacgaaagtgacggcacatcctgcatatgcacttgcgcttgccgggtttggtctcaacccgggtgctgcggggagttgcggagattatctcccctctacatacaattgctttgtaaataccatgcagatccgtgtaagccgaataaaggtgctggaatctcaggatctgatgaaccaatgactggcaagatgatttattatagttcgccgttgacttccttgattttacgcaatcgccaataaacagaaaatcgaaccaaggcgggtcaggccgacgcacattggatggctggacacggggcgattcccacatggttgtggctgagacgtgtcttggtgtatcgtgtccgcgctagtctccatatttctattagtagaacatttcctcagtttgtatgcccctaggatggagcatgtcttgtacagatcattttggtgtgctttatagctgcctctgacaaattaggtagcatttctaacttccaaggtttacccgggctcctagtgggtgactaggtctatgcatatgcatatcgacctcggaagatcaggcatgccctatttgttgtacgaccgacgtaacccaaaaaaacaaaaccaaacatccacaaaatccaggaacagccgctaacgctatgaccaaaaggcccatttttctgtctcttgtgtcgcagattccactctgatgtcacctttctcccggggaaattgagcactggcccactgatgtgcctttctcatcccgctaaggtaaatagtcacagataagtcaacgctagctcgtctcagcctgctgtgggagtttgactgaaaatcccggtaacacccaaatcctccgtactagagtggcgtgggagctaatgcagatgacattaaagcattgcgttgccccatgctccactaggaggcgactcggtataaaggaaatagcactccgcgcggagtatgttgtagatggatacgggcgacgtggactaaaacaacacgtccttgaatctccatctcttgttctagtctcggctgccttccggggactcaaaattgcgatttggctctgtttgatggatttgattcggatggttactatcaatattagactctgttactctgtatttaccaatgcattcaccaaatcatttcaattatcacgtggtgacatgcatattctagtagagttgattactccgtagttagtataccacagtttcatatttaatcgttcaatagtcatctccaactacgtctctaagaaaggcttcactggaatctctacttatttcattcacactatagtggcgggaataagaatcaattatttaaacgtggaggttcagatatatattttaggagaatgtagtactgtagttcgtcgagctaaacgttcagataatgaaggcctactgactacaagggtgccaggagccttgctaaggaggatttttagagactgtggctacaataatatgacagtacacgttgagaaatggactctactggcgatgttgtatgtactagtccaagtgggttttatggaacccgagaatatttccgctgccgaaactacaaaagtccccaaggtgggattagctcccctcacagggatccaaagccgcgactaattaggaagtggtatgatgatcatgttgaccgcttttagagtgggtgggctaatcccacatacaacatacaacttacaccggagtttaggcccagatggctttgtttttccgcttcggtgctcaccccgcgccgctttttgcctaatgagtaatgtagactgagcacgcccctgagtattacataatcatcaaactcccgaggtcgcccacctcgcatcacctggtagttacataagctcacaccacgcttcgggttgatatgaaccttccaatctttgtctctctgctccttggctgtcctaacggacgggcctcggttcaatttggagggctgccgctgtatccggttcatgcagaagtagataagatcgatggtcttcacggttgcatattcttcaggcccttgttcttcgataccaaagagcagggttgtcaaagttgtccttggactctagcagtcgacccataatctgaataccacagactgtttcttcagaattgtctcttcggtcgcagcagtaggtagagcatttgcatcaatcttaatattgcgtgtgaagttcagacaccctaaagctcatggatttagggatttagggaagtggggccccatatatcttagatctccgcttcttaaaacctcgcctgtaataatactccgtacggagtagatcaaaccgaattgagaagtgtagagaagttgcttatattctgtgctatcattggcgggggtatcaatattctactataaattaaccacccttcttttcctaaaattccattaaatgcggcgcttttattgagcgcatgaatctaaatctggttacagcacgattaaatgttgtaatatgacgttaaaacagaataaatactaagcttaggaagaaagccggaggacttgaacaaccatggctggctatgtccttgtcagaaaagtggccggataatctgggttcgactagggcttttgtatgaagaagtctatggtgtgcctacgtataagagtgctgaataatataagattaatggtaactagctagttaatttttcccacgcttagtctatagtctattaacattgttcaaccggttgttcgcatttgctcttttacacacaaaatgctctaaaatctcagacatgactagatatcaaattgttaggccagaccgttgaatgaatgtgaagaataattgcttgcctagaattaattgaccagggtaattacaccgtcggattaccacttccatttctaaaccagccggcatctactgtccgcaatgcttacatttccgctttctgccctttgaattgtctcggatatccgaatacagcaatggtcgaagagaataatagattgattagttcattatctggagtagcttcttattagcacaaagaagaagcagggtgttcattggatattattagccaaatagcaatctccaccccaaatcacgcgtatttccttatacccaggcactcccaattctactgcaaggattattctacataatggtttattcagccttgcgatagccttcctaccacctcagcctgcacctatcactaagaatggagaccaagtgcgggataacgggatcgttaatctagtcagggttttgagtaaacagacttgagcttgaatattggtgacaccctggtttaaggtacggtgcgcacttagccatcttttcagttcgcaataatcggcttagtctccctggaaaaaggctagttggtcatcaaggcgctcaggcatctctatatctctataagaacaagctgcggccacggtatcctgaagcgtctttcccatttcggtgaggtctgcccttcctttcttaatactactcctaaagcttagacagggctttcgagtctaggattcgtgtctatatccagggtttatagcgttgaagggccttcatcgcagaaagagacccaattgcatacattggtgtaaatatcccgcgtcctgtttccctggacgacactgtctaattatgttatctgtgcttaaagccatatcgagcgacactaaacaaccatcgattcgcaggtaacaattgttttcaagagcccacagaactgcacgacgaacaggaatttgtctgctagctgggatgggagtagattccctaacggtgcgatattccgctgggagtttagtctctccatcaactggtcgccgcaaatctaagggcaaataaaatactattgcgccggtggtaaagtttctcgtagagtcttttagtatccatataactactcgatacccttaaccctaactgtggcattgcacaccttctgattgatgcacactaataccaacttgggttatttttaccatgtgaaactggtaagctagcagagatgactttcatcatctgaaagtggtggtgatttcctgacttcaactttcagtgtttcatcaaatgaagatatagacgctcgttagacaatatgtctattattgcccttcttttgtacttccccgcattatctgacagttccatgcttttatttcaaccagcaacgggcaccgtcacacacaggttataaagtttggttacatagacttaaatgaccgaatggtatctatgatcgatactccctacagagtatcgtatatatatacctccgttataaaaaaaaaaaaaaaaaccgacaaaaaatagatgaaatagagtagcaaaagcatagaaaggatagaaagaaattgaccctcgactttggcgtcaccgcaccacactctaaccaaatgagttatggaaccaagttcatgtcattattccgaattttaagcccctaatctgatcacatttccagtactccataaaaaaagaaattctacttctgtcaattgtagatggcatgccaaacgtctctattaggtagtagtctccgttctccacctccctaaagatcaacttgctccggatcaacgtggtcctaactgctaactgcttactccacttgggctcacatccgttgtattggatcgacattcaacgccgatcgatcttcaggggttccatgggatcttcgctgggtcacggcattccctatgccgtactttgtaaatattgtctctagtcctgccaagaccaagcagcctgtagtcgagaacatcgttcctcggaactatcctcagtagctacaatcgtgaagcataagaggtaatccaaacatccatatcacattattcaactcatcagagtagacagaaggtgtatctatcgtctataaataacgaaacaaaactccatgcatagtggcattcctttgcccatgcgcccatgtgcctgaaagtgggcttattgacatagcagaccgcccgtggcccggagaccgtataaagaagcccgtacacattgtgtacatgtacaaggcaaaacaaaaacaaaaacaagaatatttatctcttgcgccacgacagctccaagatttgatcaccgttcttctcatcgcgcatgacataccactgagtgacactatcattctgctcgtggacggcatcctgcaaccggaagctctttttgagctcatccttgcgtcggagcggacccaattcgtgcaggtaagattcgtcattggcgccattgtgggggtcccaggtctgctccatggcgaggtcgttccgatctgggtcggagtgatacttgatgaccgagaacccgtttgtcaggatccagccgtcgccaaagtgccatttgcggagaaggcagctgtcgccgcatagctcggcgatcaccgctagcttcggcatgtcggcgtggaaccaggatttccagtggtgcaccgtgagtgggggctcgcggccggactcgaaaaatccagaggcgtcgtgcatcaggtccaattgccgcagacggtgatccaccgtcaaccgggtctgggtgtagcggtagacgcagatggcgatgcggcggtcgcctgtgaaatccatcgcagagcacttatcgtacacgttggtcatttcttctaagaggggtttggataagaaaacgcccgcgcctccgaacccaatcattccgaatgctgcaatctgcgggatagactcggataatccgccaatatacatggaggtagtgtggtcatatttagcgagcgcatccaccagtctcgacatcgacaggaagaatgtgtcgtcgtcgatgatacagccccaccgggttgtttcccgagcattctccttcaaaagagggatgagtgcgaagtatcggttgaggtagtcatcctccgcctctgtgatgtggaggttgatccctagagagtcggccttggccaagacatcccgcacgccgttttccgagcgatccggttcgatcagtgcgaaaatgcgacagcgcgagtatccagcccagtgagcgaatgcattcagagactcattcaatcgctcgatactggtcgcgactccaaaatcgatgtgcgatgcgtccgccaatttcggaggctgggggacctgcaaggacactggtgtgggaattgagcacccgtctgccgcctccccggtagcccttcgcacttccaagaacggctcttcaagccattgcgtgtagggcactggttcgtctgtcatatcgagtatgatttctcggcgggtatattgggcgacgttgataacgttcaggcttgccaatttatcgtagtcgagatcgcacgggacattgggagcgacggtgatgttggcagctgtctctagcggaatcttcactggctcgaccgagggccatagtacagcggcaaatcctaccacaaacaagaagataactccaaatcgcagcacctttttccaagcccatgatcccggaagatacccatctcgagcaccgaatagcatgttttgtgttgtgagattgtgtcgggttctaccgcattgcggagacaattattttggtctagaacagggcccacggtcgcaggcggatgaagtataatataaatatgtccaggcggtatggcgagagatggagaagaggaagaggcagagaaagaggaagggaaaaaggcagaggaggaacaggaacaggaacaggaacaggaacaggaagaacgtgagactgaaagaacgggaagacaagggtcaagaaagggtctgagacacgatcgatgacgttcaaggtctatttggcggaagtcacgtgtgctcgtatagtacatcgtaacttggagattatatcccggtccgagctggggaaaagacagtataaagatgccagcatggctctattgaaattcctccgtttccatatatactactccgtgctgtcttccttggtggtttgctaatttccgaagtgtacaaagtgcagagcacagccgtgctgatgccaagactttctgaggaatgatcccttcttttcactcgtcggcgatttctccggtccccacatccgcgcgtcctctacccgtgtgctacagagtactccgtccaggctttgatagccaaggcactacggagtgtttggccctagataagcactacgatggagtacaacggagtactttccggacggccattgtggtactcgataacaattggcatttgcgatataaacatttagaccctccggcgcagtggttcacccacccagccccactttgaagatgatattcatgcctcttactggaagttactcgaaaagctttggttgcaaatatgtacggagtcctccgtactgcacatcatatggtatcgaaccgacccagctaccgataccaatgccaatgccaatgctaatacggagtagatccgaaaagaaaacctagtttgccttgcgcattgttttcttggttctctccggatttcgccctcggcattatgttcccgaatatgcatagatggtggtcagcgtagaggagacattgcgcttcaatcagctagcggcttactggtcgctcagacagtctcctttcaacgtcgctatccctaggtattacacccaatcgaaaaaagtgatcaacagacttagagtctgtccacgcgcaaaagcccactgcaacctctacactagatgatatatcttcgcaagaacatatgtgcatttaccattagaagagcaggcagacgaataataggaggagagaccaagttgtagcttaaagcttcacactacgtagtaagtctgggtgacgatgaaaaggaagttaggtttagtacctacagcaagagtccccccccggtctaaaccctcgtgaaattgaagtacgggaaattagttcaaattttgtccatatcaagcttactctgcaagaattggcttatatgcagttttgcctcagtacacactctacaaacgccagtgcttcgagatctgtcaccgttcctcgtggatttgtcgatgtcaaattggagaatcatataggacacgtgagctacggcggggcacatatcgttgagcgcagaaaccccccaatggggaaaagaccagttccgcacattggagtttgatatcagttgatctggggaaattggccactgtgttctttgtattaatcacgcgtttttgatcttttatccgacattgaagttaccgtcttcttcgcccgcaaattatcccctaaaattctcgacccccgccatggttgcgcaatcgctggcttcgctattacagcaagcgtcgattgatgaccacgaggaagtccttcagtcatgcaatgcagtcctcgccaaatccaaatccgacctgcaagcacagcacatgaaagtcgttgctctgttgaaactcgaccgttatgaagaagccctcaagacgttccaggccggaggcgatgcgctgaagcagagtgcaggtctggaatacgcctatgcatcatacaagtgcgggaagctcgaagaagccacagaagccttgagtcgcacagcttctgggcgtggtgctagccatctcgaggcgcaagtggtaggatgccccatctgtccttctgttgcttgaggaccaatgttgattgtcgtgtcataatagcgttatcgtactgaacacttccgacggtcagccgagatctatgaacaactctcaaaagatacgacagctttcgggcgcgaggttaacgacctgaacatcaattcgtgggctaccgatgcccagcttcaatggaaaggagagacggaattcgtgcgccacgaccgattgtcgagggaggatttggaatcattcgaaacaacctacaacgcagcttgcttgaacattgcaaagggagcgtttaagcagagcgaggtcttgctcaaccgagctcaaagtcagcatctctccgtcttgcctaagactaagactcagactgacgttttgcatagatatctgccggacatcggaggacctttcacctgaggacaaggccgcagagctgctgccaatcgcagtgcaacaactctatgtcctgattcaacttggaaagttggaagaggccgaggcggttctcaaagatatccccgtggaaaagtacgtttaatcgtacctgctcgaaacctattgctcacatcctttcctagcatcaccgagctatcaactaagaagattgcccgtaacaacatcgtcctcgctcgcccgactgccgtcaatccctacatcctatacaaggccctccacgacaccccagatgccaccaataacgatcggctattcgaataccaggaccgtgatgtgattggaaattcgcatgccgcagacctccttgttcaaaaatacgatggtataatccggtctacagctaaggcacagtcaaaacgcccaagtccatccaccgacgccatcaccaaccttctctctgtattcaacgccgcagcacatgctcaaggcgaaaccggccctaaagcccttaaacagatcctcccattgctggagcgacggcccacagacatcggccttcttctgacagtggtacagctctatgtcagcggcggcaacaccacctctgctatcacagccatggagcaaaccctcggcagtcttgagggcccaaacgagtccgtccgctttaacccaggcctactcagcgtccttgtctccctgtaccagcgcgaaggccgcatagtccagatccgcactaccctcgcacaagccgcctcctactggcgcactaagcccgagccccccgtgtccctcctccgtgcagcagccgcctcccttttgcactccgaagaccgcacagacctagctacagcgggtgatatattccgtggtctgcaccagcaagaccccaatgaccgcgtcgccatcgccggctatgtcgcctcacaagcaaccctggactatgcgcagattgagtccgagctcgaccgcctgccggccgtcaacgacctgatcgccgacatcgacgtctcagctctggaatctgctggcatcgctccctccgcatcctcggttgccgcggccgctgctgcctttgctggtgcccgcaagcgcaccgctgctggtgccgatgagcgcgccaacaagcgtgtccgcaagtcccgcctacccaaggacttcgatcctgccaagaagcctgatcccgagcgctggctgcctgtgcgggaccgctcttcttacaggcctaagggtaagaagggtaagcagcgtgctgcagcactcacgcagggtggtcccgtcaatgagaaggcggaagagtctcccgcccagcaaccgcaaaagaccggcggaggcggtggtggtcctaatgctaagaagaataagaaaaagggcaagcgatagtgtaatttcagatagaaatcatagctcgaatgctacctacgatacatggaacacaggtatgtatcttgtatttcatattgaagggcgcctcaaacccgagacgggtagtagaatgaattcccactggctttgtttagcccccaagactccaatctttgcgataaccgaatgtaagcaattcctgtataaccaagcctaaagcaaattttcgagaaaacaccggacgaaggccctctctaccacatcaaaccgtctgttgagcaatcaacgctcaacccagcggagtccgaatggtaccacactggcggttgtagtggtcaaagatcatgagcagcagccgcagatccatgactgcgtcatcagcggttgtcttcgccgccgacccatcaccagccaaataagaatgcagagccatgaattcacgctcatacgcctcatcacaggtactaacagtctccgtccgcttcacacgaggacgaggaacagcattctcggtctcgttaatctgatttccattgacattattcgtatcctccgtcccgtccgcttcctcaacgacaacccgcacataggtaccagtactgattttctcaccaggacgcgggaagtcgtactccacactgagagtcttgtgcgcgccatagagagtcaaatgagcatcgcagcgaggcacggcatcaaccccagcctcatagagaagcgtaaacgggcgaccttcattctcggcggaattcgtatagtgaaaaatggcagaataaaacgggtccgtgatagcgacgttagcaacagcatccgggaagcctagcgactcgcgcatcagcgatagatcatgacaaccctgcatgccgaggtagcgacagaaagcgactctgtccggtgtaaggtcttctttcaacccgaagacatcttccaacagcgcgtggaactgctctgggttattattgcgcttcattgccggcgtgatatctttcgaggccggcgcgacgatgttgttcatcggaccggcgatgtgtcgacatcgcgcgtagtacacgcggcctaaggaggcgagttccttcttgaagacatccgtgaagcagggggcgtagcggcgcgcgcatccgatgaatacctttgggccgtctgtttcgttggtgccgtcaagggatcgggaggccttgccttttttgattgcttcgcggatgcggcgcaggcttgagacgctcattgagagagggacttcaaccattacgtgtttgccggcttcgagggctgtcacggtgtattgctcgtggtattccattgggaggaggttgaggataacgtccacttctttatggcgcagaacatcttcgacgactgttgtgctgtaggtgatgtcgaagcgggattggcattggttcacgacttcagcgttggggtcgtatatggctgtgagggtgtagtgtgttttgagggaacagaggactgggaggtaggtggcttgcacggcgttcgtggcgcctaggatacttaggcggaggatgggggtggacatgttggcggaagggtaggaagctgcggatctgatgggtacatatggagggaagccgagagacgattgagttctttgtagttcgtctcagctaaatgactgagaaggagaatggtatctcaagtagttgagggattaagggagtttcgaatgtgaaagtgagcaaagctctaaaattagagtaagagcgatgcctcgttgatacgatctcggaacgatcaaacaaagaaaatacggcagtgcccctgtgagctgtgtaccatcggcttcaaggacaggacatccctggagcatgccaactttgtgacatcattgtcctgtgatctagggccacatttcatagtttggtctgagttttaccccggattcgaaccatggctggtaaaatccgatacacttcatacagacagccgcagattatctgtcgatcctatatagatatggatggtccatgctatgtgtacgaccgatattggttggaaatgaaaggcatcatagatagtgacaaagaattatactcccgaagtagactcatcttagaataaccgacctttggctatcatacctctgtaggccttttgagcgatctttgcaagaatacacatgcaaggatgtcagaacaagaataagaattatccacccgacgtacggcagtggcagctctaaccgctagtgcgtcatattagattttgcctgcaggcggtcaaacttgactatagagcgctgcacttctgtggcgtctagtggtactagtaggggttagagactgctgtaacccgacggcttccaatattcttgaaagtggagaagtgttgcagtaaactgaatgaggatgaaccatgttgtatagcgtcacttatcaatctccgagtactccgtacggaaggccaggtcccggatggccgaatactcttccgttgccggccggtacttcaatttccgatccgttcaaactcataggaaaagattaaaaggcctagaaaagttttttatcccgttcaaagttcttggggcgcaaggacaggggaagaagggtgaattccctactagcaaatatattttatacgagtaattcttcattgctgtgaggatccgacttgcctgattccctatccgcacatttgagaacgcagccttgttagaattgtactcgttttcttgaatcgaactggcaagtcacagttgctacagacatgtctgactttgcagagagcccatcaaatctacccctggtagggaagtctgccatcgttactggggctacccgtgggatagggcaggaaattgcccgacagcttgccattctcggggcgaatgttgctttggtttacgtttcaagtaattccaaatcaacagcactcgaaatgatcgacgagtttacaaaccaaggtcggaaatgctgcgcaattcaagccgatctatcatcgggaacctgtggagaatcaattgtcagacaggctcttcaaggccttggggttgggaccatcgaactcttgatcaacaatgcggccattgctcaaacacccgccagcgttgaagaaccgttggatcaagatgaatttgagaggtaagcctttcctgttcacggccttcgtggggatctaaagattgctaataagactaggatcatgcacatcaacgtacgagctcctatccttttggtccaggcattgcttccgcacctaggaccgcatgggaatagaatcatcaacatgtaagtagtttcgacctaattaccttcacaccagcattgaccattaacattcgttgcagttcctcaattggttctaggctgaattttccaggatatggtgtttattcagcaagcaaggccgctttggagtctttgactcgtacatgggctcgagaacttgccgtcaagaatcatctcacttgtaatgccgttttggtaggacccacagcgacacctgacgctcccgacagtgatgcgagggccgctgccaagggtcttgctaccgccgagcggagactcggaacaccgagagatgttgcggatgtggtcgcctggctttcgggagaaggttctaggtgggtgaatggggatttgattggatctaacgggggggcttttatgtcatgattgaatggcccatagttatccgttgaatttacataactcacattacattcgagaacagcggcaatagtaaaaaatattaattaagctgtgttatagtaaacagtttagtgactctgcggagagaccacgactgaggttcaactgttactcggacatagcggggttggactaccgaccggggtaatacgaatctccgtcatctgcctcgcagaaatcgtgggatcggccctcgtaaagaggcgcaggggaaatggttgccgcctaaaatccgtaatatatatagggctgcgtatacatcaatttaatgacttcatgtgagatacttacggatacttcattcgcgagtaaaaacacgtgggaacaaagtatcccgaagtaccttgcgtataccctcactccaactgaagaggggccgctatccacatcaggcaacgtcaccgaaccttggaactctcctctcgtgatactccaaccctcggaaccttggaacttctgcctgtgccttactttatctcctccttgctccatctgattcatcatgggtgtaagtcttccagattcccattcttactagttaccacttcccgagaacccctcaatctgacccatctttagtttgctcagaaaattgccgcagctcagaataacgagaagatggccaatagtggttcatacggaggtgcgcctccagcaggctacactgggggccctcccgcagccttgcaaagtggcggatcggtaagtcatatgttgtgcctgtttctgctatgactcgcagttccgacgtcatcgaaaaaggaaagtgctaacgttcgcagagtcaacagccgcaataccaggcttattcaggatctccggctcctcagggatcggtacgtgctattttttcttaactctttttgctttttactttcccccacttccacgatttacccctccacggtcatcattcttctggaacaaccatgtcgggatcttaccaaggctatcctccatatggcggctcatctcaacgtcagaacaatccgtcatctccctattcccggcctccgccatccacaccctaccccgcagctcagcaatctcaacaaccgcaggcctatggccgcccgcctccacccccaccacaaggccagccctatgcctccgctagttcgccctacccaggtcagcaagcgggacagccatatgcttctccgagctcgccatacccaggacgacagtctgcacagtcgccctatcctggtcaacagcaacctccacaaggataccctggacaacaacaatatcccggacaacaacaatatcccggacaacaacaatatcctgtacaacaacaataccccggacaacaaccatatcctggacaacaaccatatcctggacagcagccgtcatatgtacaaaataccccttgccctgattcaccgcatatttctgttccgtttttgattacattggattctcgttgaacgctcaatggctggaaaagatgctaacgaaaaatagaaccaggcagcgccctattcttctcagggagctccataccccggtggccagggccgtcctggacccgcacctggaccaccaggcggaccaccaccaggccagtatggcgcacccggaggcggccctcaggctgcagctcccccggctacacagcagcaggctgcagcttaccgatcgcttttgatttcaacgattcaagagaggaatctccaaagcttctaccctccggagcgactggaccgacttgttcagtcgctcgccgccgaagcaccggctaagctcaataggctgattcaggaatgggccgtgcccatggaggtggcgaccgatgtcatgaagctctcgttgttcgacgtgattctctacgttgatgatagtggatctattgaatttgaagagaagggactccggaaggatcaactccgacagattcttggtattgtagctactgctgcatctaccttcgaccaggacggtatctccgtccgattcatgaactctagtgaggtgggcgatggcattcgcgatgcggaggatgtcagtcgtctagtgtcccgagtccgtttctccggcctgacccccctgggcaccagcttgaagtccaaggtcattgacccgatggtcgttcagcccgcccgggccaatcgtctcgagaagcctgtgctggtgatcaccatcaccgacggacagcctgctggcgagcctcacggcactgtgggtgatgtcattcgctatgcagtggaggagacgtcacggacccgttatggccctggcgccgtatccttccagttctcgcaagtgggaactgatcagcgggctcgcgactttttgggatctctggaccaggaccctcatattggccacctgatcgactgtacctccagtaagttccacatggggctcatgatggatccagctaatgtggtgttttagacttcgaggttgagcaggatgagatgtcgcgtgctaacccaccagtgcatctcactcgtgagctttgggtaagcgttatataacattgatcatcgcgtattagtaaactaactatgattacagtgtgccaaactgatgctcggcgctattgattcctcctacgacaccaaggatgaacgagacaacgaacgtcgcggtgcacctccacctgcatcgataagccagtacggaggcggaccatacggtcaacccccgccaccccagggccaagctcagccttcatatggtccgccccctggtgccccaccggcttcgtacggttcccagtccggctacccaccgcagggtggtcaataccaacagcagcctccccaacaggccccccagcagggcactcgtggtgcctatggccagcaaccgcagtatgggtcacagcctggacctggctaccagtatggcggacagccgccacgctattgatagagcatgacgtcatagggcttacgagtttcccgtttttcgccatgcggctttgagggaaggttgtggggtgatcacattttagtctacgtagcttcgaacgcgttgaacccaacttgtaacttgaatatcattgtttcgttttaaactggggatttctaggccttccaaggttacaggtctcttgtaatcgggcccgccaaggctacggagtacactaagacgaatcaacccacgggttcgctagttgaggaattgtgaaacctacatttgcagaaacactggggatacacataatacacaaaagggtcgtacatgacctagatatgtatattgttataacattttagcgaaaagagggggggaaagtcactttatactcccagtttttccgttttccatctgcaatagggttgcagggtcttgggaatgtcagggtggccaatagaaagccaggcagatctggatccagcgggccctcgtatgtcgccccaatgcagcgaggaacaatcccctttgattcgacgattcttaatttaacctggatggggctgtgcctgggtgcaggcggggatattgtatggttgcatcttacgcgttgcctaaaactctgccatgaacggggtttgttattgggacggtcttggatattgagacgtttgggttgttccacttgaactccaattttgtcgttatatgtctgcctatcatttatttccgtgtagatcgagtacgtcttccagatatagttggcgcactaggccgttttggggttaccatttctccaaacttggtcttggctactcctggcctctatctgggtttttagtcccttagtctcttggcctcttggcctcttttctttctcttctctacaggacattctacaggaaacaatcattgcgcccttcatttctatccttgcgtccgacgggagtactttcatttgctccacattcgcaacaccttcgttttacgacaaggagaacaaatcttccccgctaaaagaacagcgaaagaatgattgtctgatcagcgtgtgcaatcgaatacttcaatctacgcttgaggggaagttagtcgaggaaggatccaacaatattggtggaaaagaatcaccgagatcgtcgggttctgtcccgcgccctcgtgcctggaattcgtcatgtcgaacaaccaatttacggaagctacagagggtacccgacccgagcagaacaatgtcctccgacgcccatctcttgcgtcgtcacatacgatttccgactctgggcggcggatctcctcccaacatgtacgcttctcaaccgatctcgatcgcgagtcgatcgaggaacaacgacagacaaattgggaccgtcgtcccaattcccgcggcctgaccgtcgaaacagcgctggcgcctgcgtgtgttcgacctgctccctcacccacctctccgctctcacctaccaatgcgacccaaaatgcgactctctcccctattccctcgccaaatcctgagcccgcaggccggtctcggtcacgaaatcgtggttattcgctccggcgcagcatctttaataagacaatcaattcgacggagaaggacgatcttgccctagctgagctgggggaggccaaggaaccctcgtctgatgtgactcccacacaggcttcggctgcggagacgctcactaccgccgatgagaagcatgctctgagtgtcgcgccgacggcgacgcttgactcgatccatacagaggacgcttccccttatgtctcgtccgatcctttggagaagtctcccaaggagcagttccccgtgtctgtggcccatgagaagtggctccggaaaaaggcgactactgcagtggcagtcgcgcgtttccagactgttatggcatctatccagaaattcattctccgaaccaaggatatccctcctactcaggatgggcgccacattgacttgaatccgtctatggtggattctatgattgatgagcgcacccagaagccttatatcggtaacttcattcgttcgagtcgttacagtctctggagtttcttcccccgccaattattggcccaattcaccaaagtcgccaacttctacttcttgattatcgccatcttgcagatgatccctggcttgagtacaactggaacatacacgaccatcgtcccgcttttgatcttcgttggcatatcaatgggcaaggaggggttcgatgattggcgccggtatcgtttggacaaggaagagaataatcgggatgcttgggtgctccgcccaggccacggcacgacccaggacggagcctccatgttcagcaatactcaagattgggagcggatcaagtgtgaggaaattcgtgttggagatgttataaaacttgagcgcgaccagccgattcccgctgatattgctctcctccacgccaccggacccaacggtgtcgcttacatcgagaccatggctcttgacggcgagacaaacttgaaaaataagaagccttgccagcctgtgtctaaggtgtgctcaaccgtggaggatatcaacagcaactccttgcactttgtcgttgaggaccccaacttggatctatataagttcgacggtcatgtcactgtcaatggccaggagaaactgcccttgaccaacaacgagattgtttaccgcggcagcattcttcggaacactgaccgcgctttgggtatggtgatatatactggcgaggagtgcaagatccgcatgaacgccaacaagaacccgcgaatcaagaggcccgctctccaggataaggttaaccgtgtggtaatgctgatcgtggtgttggtcattattctagccgttgtttgtaccgtggcctacaagttctggtctcgcgacgtggagcaacattcttggtaccttcaaggtgctagtgtctcctacggcccgatcttcacttcgttcctgattatgttcaacactatgattcccatctccctgtacgtgagtatggaaatcgtcaaagttgcccagatgctgctcttgaacgatatcgacatgtacgatcctgaaaccgacaccccgcttgaagcgcgcacatctaccatcaacgaggagctcggtcaagtcagctacatcttctctgacaagactggtaccctgacaaataactcgatgcggttccgcaagatgagtgtggctggaaccgcgtggttgcatgacgcggacctccaggaggaggctgctcgtgcaggcgaccacaccaagttgatccacaaaaagcggagcgcaaaggggaaaaaggcaatgggacgcaagtccaatgtttccgaggctcagatgccccgtccgtcgaatgtttctggacaccttgatgctctccgtccgtatggccggtcggctactacgtaccgcaccgaagagatgctcgaatatatccaacgcaagccgtacaccatttttgcccgaaaggccaaactgtttattctgtccatggcactgtgtcacacttgcattcccgagcaagacataaacggaaacatcactttccaggctgcttccccggatgagttagctcttgttcttgcagcgcaggaactcggatatctcgtcgtggatcgtcaatcaaacacgttgaccgtccgcacacaaccgaacggaccagatgaagccactagcgacgaagtctacgagatcatggacgtgatcgagttttcaagcgcgcgaaagcgcatgtcagtcgtcgtgcgtatgcccgaccaacgcatttgcctattctgcaagggtgccgataccacactgatgcgtctcctgaagcaagccgatctggcacgtgataaggcgactgagatcgagcgccgtgcaagcagacgcaagaatgccgaggtgaaccaggtgatccgacgtaacagcgagcaccacagccgaaagaacagtggtgttcggaacagtatgaaccggcctagcttcagccgtcgccgctcgtcgatcactggccaacagggctcggctcttcgagctagtatcgatatttggctgcgtgaccgggagacggatgggggtatgcggaacagagaggctgatagtgagtactacagccctcggccatcggcgcagatgggcagaccgtccgctgcgatctcggactctggaagctctacgaatggtgaagaagacgaggatctcgtggaagaggcattggttgtcaacgaagcggctgttttcgagcgctgcttccagcatttgaatgactttgccactgacggcctgcggactttgttgtatggccaccgattcttggatgaagcgacctacacggattggaagactgcttacaatgaggctagcactagcctcgttgatcggcagcagaaaattgaagacgccggcgagcagattgagcagcagctggagcttactggggccactgctattgaggataagctgcaaaagggcgtgccagaggctattgacaaattgcgacgagccaatatcaagatgtggatgttgaccggtgataagcgggagactgctatcaatgtcggccattcgtgtcgtcttgtcaaggagtactcgacactgacaattttggatcaagaaaatggcgacgttgaggagacaatcgcgcatcttattggggagattacccatggccgcgtggcgcattctgtagttgtggttgatggccagacgctatcgttgatcgaagcaaatgaggtggtgcgtgagcagttcttccaactggctgtcaaggcagactcggtcatttgttgccgagcgagcccgaagcaaaaggcgttcttggtgagatcaatccgcaaacagctcaccgacgcaataacgcttgctattggagatggcgccaacgatatcgccatgatccaggaggcccatgtgggtatcggcatcacgggaaaggagggattgcaggcagcacgtatttcagactactcgatcgcgcagttccgcttccttctcaagctgcttctggtgcacggccggtggaactatctgcgtgcttgcaagtatacactcggcacgttctggaaggaaatgctgttttacctgactcaagcgctgtaccagcgttggaacggctacactggcaccagtttgtatgagccgtggagtctgagtatgttcaacacgctgttcacctcgctcgctgtcatcttcttgggtatcttcaccaaagacctctcagcagcaacactactggccgtgccagagctctacaccaagggtcaaaggcacggaggcttcaatatccggctctatctgggctgggcattcatggcgacgtgcgaagcagtgataatcttctttactatgtggagtcttttcggcctggcaaaaatcaaccccagcgacaacgacattttctccatgggcctactcaccttctccgcgtgcatcatcgtgatcaacgtgaaactccaggctctggaagtccacaacaaaacctacatgtcgctaattgtaataataatttccgtcggcggctggttcatgtgggacctaatcctcgaccgtgaatacacaatgtcctccggcaaaggcatctacttcctcccgtccaacttcatccatcactccggccacaacctgctcttctggaccgtcctcctcctcgccgtctcagcagtcctcctctttgaattcacagtctcaaccctccgcgccctcttcttcccaacagacgtcgacatctttcaagaatacgaacaagacctcgacatccgcaagcgcttcgaagaagcagctgcctcggagctccagcagggctgggaccacggtaccaagagatcaagcttcgagatcgcccgcgacaacgccgagaaggttgaaatggacgcccgcgaacgccaggtccgcgagctgctcgcgcgccctcgtgtcatggataccaaggatgtcgagatcgatattgccagcgccacggttagtcataatagcagcgtgccgagtcgtgatactgaaaaccgtggtcgccaatctggcctctattccgaagacactaataggcctcggcgttctgttgagatccaggagctctttagtaagggctatggttctgtgcgcaagggtcaactcaaatgattcaagattcaagattcaagattcgtatatgtatgatgttctctcctttcttttttttcccccctgctgttatatgttcttttcgtcccgtgtctttctctcatagcgattgcatctgcgattctcctgtccatttacttatcatacgattccctcgggcatcgaagggcgttggtttggttttggttcctgtccacacttcatggtctctcctttttgttcgctgttcggtctgttgcatagtcggccgtcagttataagataccccgactcacatcgttggcagtctggctttttttgtgcgtgtgattcccctttttgctaccggttgaggtgcagtatatatttttcacctcgcaaaattatttttaattaaaagattcagcagaccttttcttgctagtttgccacgaaggtgaagaattaatggagaagcaatgcggttttctagacactaaagtctagagtccagtttacatttaagggcagcttaattaatctaaacactgtatatcctcagtccactactcgtcggtatctgcctccaatgctcctcttagatcttcaagatgtctgagcatgtgcaaactagttcaaataaagacgcttgagaataagcgagcgaatgcttccatcaccggctgatgcgttggtctcaaacgaatctgaaacttggcaggcatttgtcgacaacttttccaaaaccatgtaccacttcggagcttgccttcgagtgcgaacacgacgagcacttgcggttctcgattgtgggataatagcggcggtgttaaaggcaaagaaggtagtgggctcgaagtactccgaattctaggactagaagtagctacgacttttaagcccgaaaaagaaatgccttaagaaccaagaaaacaaagaaaaaacgccaaccactcttgaacttgtgaggccttgaaactgcgatttcatctcttccagataccacgtctaaccccggccgcgctggccacgcgcacgctgcactgtagccttaccacgcgccaaaccgacaccgcgcccgcgctggcctcgtgtacggaacatgggtgcattcctagaagagagtagacagtcagcaaaggtgaaactggagatgcgcagttccgcaaaatcgtaaattgcgatctaaaagctggatatccgagttcgacgtaccggagcatgtcaggcacgatgaagaatcgcacgtggctgccgcgaatgtagacctggtcgagatgggagacacggccatcgcgagcggtgacggtgatgtccttgagctgaacgttcatgttgtcctcggctgtaggaaagagcagtcagtatgtgaccgcgcaaaagaaacattccccgatgcttgtttgacctctagatagagagtagacaccaagctcgagaagaaatgaaccacgtaccttccaaaagcttcccccggtagacgactcctgatgtgatttcaattgtcacgacatggccctattggaaaacgatattagcccctctgcctcgcgcgagatcgtgcatgaattccattttcgcgcgatatgtacatggatcgtataacaatctagatagcaatatcggggaatataacgcacctgcgcttcgttgaggagcttgatcgggatgccgatcgtggaggtgagcttgcccattttgactgtgtgacggcgaacaaggatgaaaaacggttgaaataagtcgaacagaaacaccggaagcttccttcgtaccaacaagggacgaataaaggcaatgggtgatcgtggggagatggtgggacagtaacgaggtcggttaagtggaggttaagagaaaggcgagttttgcggttaagctcatcctctccgctttggctgttccaaccccgaccaaacaacaacctcaacctcaaaaaggcaccaaagaatcacccgtgatgtgcctccaataacgctctctacaccccccggacctctacatcaaaaatccgaaacccaccataatggccggctcacccaattccaacctacgcggcttcaaccacgccgtctacaccctcctcaaacaaccaactcaattcctcccacacctcacaatcccaaccttcacccagctccccgagaacctaggaccacacctgatcaacgcaaagaaagggccccaaacacaaatacccacaatccgcgccctagtcctggacaaagacaacacgctctgcgcggcgaaaacaacaaccttccccccacagatcctagccaaactctcctcactccgcacctcgccaacatccctcttcaaccaaaccacacacccagactcaatcctcattgtctcgaaccgcgccgggagtcacccgcgcttcgacggcgaagtctccgagctggaagcgcagcttgcgcctctgcgcattcctgttttccggctgccggcgggcgcggaaaagaagcccttttgtggcgaggaggttgtgcggtggtttcgggagaggggggttattgattctccgcatgagatcgctgttgttggggatcggcttgggactgatgtgcttatggcggggatgatggggtcgtggagtgtttggtgtaaggagggtgtgtttgatgttgggatggaggggaagcaggagcggaatgtcttggagaagatggaggtttggattgaatggttccttagggtgaagggagggtatgaggcgcctttgccgatggggtgggagaagcagaagcagtcgtaaggcgtgtactgcgtggtggatgagacctttgatacccttgtataaactgtaccagtatgtttaccagtgtccagtatagtcggactgaactacggctacaatctacatagagctgtatgcaaaatgaatttattcagagcctagcgtcaatcccccaaactcgtataccgccagctcagcgctgtcctacttgtatggtcccgggcagaagatatcacaactctgcgcagcccagaggatcggcgttggttggatgtctgacccaaacaggtgccgacacaacaagctcatgtgcaaaaactcgactccagacccatgatgggaaacgggccattgaaagtgcagggcagacagaagtctagcaccagccttgaaattcacacaaaagagaataaaagaaatggaggggaatggagtcgcaatccaagccggtctgtttggcataaccacgtaaaagagaaatgtaaaaggggaaaatggagaaaatcaaagaatagtgaaaatcccggtcataagtcagaagaacatgaagaatggtaaattgaccgggagcaaagaagagaaaaaaaagtcctgtgggaaacaggaacaaaaagagcaaaaaatcgcttcaggaccggccccagaatagaaagggtataatcaatacaacaagacacaagggtatgtcacgcaagaaacacatcaaagggtaaaatcgcttccctagccatcgccagcgagacgagaatcatccgaaaagagccgtcgagtgggtgtttcaaaacaccgaaactcgacttgctgatatcggacaattaagaaacttcccaaggtgaaaaaaaccccaaagaacccatcgacaagcataagcgccgcatgcacagaaaaggccgtgaaacatcaagagacaaaggagaaacacaaattcaaaaaaaacccctgagaggcaccacactcgtggttatgacccagttggcataccctgcgagtttatctcatccaggttagccataccgtgggagtaatcacccatgccgggagaagggtgagcagagaggccgtgcataggcagttcgaagctgggactttcgtgcgaaacgtcatagttcacatgatgcttcgagtacatatcgttcatcgagagaccgtcatcgaagctagtctgctggtcgtgcgagaaaccgtacatatcggacgagccgtgcgacatgctggatagtggcggcgagtggtttgcaatcagtgggtcggcagggctcatgctagagtaaggagacggtgcgtgagagcccattgccgaggcatccgttgaaccccccgagacgaagggcacgttgaactgaggcgccatgctggcgattggtgtggaatcgtcctgaccggcgttgctgtacatgggactggcgaagtcgggaggcgaaccggtggtcgtcgcggacatggggttgtggaaatccagcccatatccttgggtatcgatgcggaggtcggtggggagatgatgcactgactgtggaacgggtgcgtagatgcctgcttcggtgtggttgtatgggggtggaggtggcacgtggaaggaagacatgggactctggaatgtcgagatgtcaactgcaacaggtaccgaacggcttcgttggcgcttgtggccacgagcagctggcatattgaagcccaagtggttgctatcctggtacaggttcatgtaagttggagcagcaaaatggttgggctgagatgcaggacgctggatgaatggcggggacatcgcagccggcacggcgaagctgctgttattataagccaggcggttctggaaagactccaacgatacaagcttggcaagctgaacgctcaagaccttgggatggcctcccaggtgatgaaccatgatctgactagcttgctgctcctcggtgaaatcaccgcattggtagaatcctccggagttagacgagtccatgtaaaagtgcggcgggcggttcaactccacaacaagaccacctggtcgaggtggttccccattcggcccagggctcggatccccagtttccaaggtgatgttcttgatataggcaaacggatactcgatcttatagccggcagcatcgttgttgatatagtaagtcatgcatgccttatcaggggaatagaaaacgaccaagtccatagcgttttgtccaatgcgccgccagctgccgacagtcaaggaacgacaggtgaagtgagaaattactagattaccaattaattaatgggcgatggagcggagggagttatcaacataccgactttgccagaagggctggtctcgtttgcgtacatgctaggctggccgtatgcgccaacccgtccaaatgggtctcttgcgccagctttgttcggatcaaactgcatcgcgagataatgtcgcatagattctgggatagagtcacatccttcgccggtctcgatgctctttttggccagcatcttgattttagcgcggctaccctgagtcagtaaagataatagaaatacaatcccgagtagcacctaccgattttggaaccagatttgcacagaccgctcggtcatattaatatctgaagcaatacgttccctggtagccgcagtaggtgttgggttcttgttgaattcgatttctagaaggacaagctgatcctgtgttgcgcgttgacgcttgttgtttttctgttgttgagtcagagtgctcttgcgaggaggtcggcgcgtaaccgacgaatgagccgttgtagcactcgaggttgacggagagggcgtggaggctggaggcgaggaagacgagggcgcaattgcgccgtttgatgggtaatgcatttctgtcaacaaagacataatgtagcgtgagtcggtagagaaatatatcgcacgaaaatcgggactgtgtccaagctgttcaatatgtttttttgggtgcgtatattgtttattttcggaaagaaaaaaagtaggtgtgacgatccggccgacaaataatgaggtgggtgtacggtacggagacggaggattggaaatattgattccctcgaagcagccacaggcgcgagagggtcaggttgaagatataaatgaatggaagtgtagcgtagggatccaatcgcgagggtgtccacgtcagtgactggggggttgggttgtaagggcgcgtcgcagaggcgtccggaaaagaggggataaataaaaaggctggccaaagcagctggaaacgaatggcaggggaataagatctccctatatcgacaggaatcaatgaagaatcaaagatgtttctgcagatgctcaaatacccaggttgaatcgatcaacggggcgggaacgggagggggggcaaaccgtcgaggaaacgaatgaattgggcagaaatgagtgaggtataatgtcgccgtgaaagaatgaaacggacgcaaaagaaaaagaaaagaatggagggaatgagaatacaagaagcgcagggcagaagaagcggatcaggagatgggagatgctgactacacagagggaaccggttgatggccaacgcaccggagcctttctggactattggcacctcgtgggggccccattgtttttttttttttttttttttttttttgggccnnnnnnnnnnnnnnnnnnnnnnnnnnnnnnnnnnnnnnnnnnnnnnnnnnnnnnnnnnnnnnnnnnnnnnnnnnnnnnnnnnnnnnnnnnnnnnnnnnnnnnnnnnnnntttggactattggcccctcgtgggggccccattgtttttttttttttttttttttctggttagggcctcgatttctgtctttttttagttctcttacgttttttccctcttttgatgtattctacgagattgcagattgcagaaaatcctggaggggtttccatccgggtcgagtgcatgaagtggtatgtatggagtggagggaaaactggttttggcccctgcgttgacctgcatgagtctaaagcagcacggcgacctggagcaataagagcgcagcgtgagcacccattgtttggaagaggggtagtgccactccttactcgtcgtcttgtccaacggtgtgactctcaggggcagttcaacctggaaatggaatgaatacaaacacactgcaataccgacaatccacgtgagatcgggaatctgagacagtgtcaagtcaatgcgttcggcaaagcgtttgacgaatgaacgaggaggtggaaggacgatgtgatagttttcccctggcaagtttcccctgattcgagcaccacggtgccaggggctaagccagtggactcggccaataagcttgcagttacacgtgcagttccgcggaccgccaaaggagaaacattcaggtacccgccccggcattgattatgattggccggtgggacatgacaggtcattctagaccccgaccccgaccggtactgaattcagggtgcaactctccttcgttgccctaagtcgtacatccgccatatccggttttacgatactgatcccgtcatatgataactatagttacaacttctgtacattattctatacggatatacggagtactccgtcttcaatagccctggatcgtctcaactctccggtgcgtctgtttcttacattgtagtattttacttcgggcattctgaccctgtactgcatgtagtattcgcattcccgtgaatatgatatgtagtgcattatcatccttgacgtgcaaaatcccgggcattccaatctaggcaaataagcaaatacccctgggacagttcattgttttaactccgcgaaccggttcatccataattaccgggaaaagagaaagccccctaaaatacccaatatccaatattccaaaaatattaacttcgttagaagatgaagaaacaagcccctcgatcaagcgcttgcacatagctatccacaattgacaattcagtcccccttggccaaccggagtcattacccaactcacgcagtctatccgtagtttcccagatctgctcaataagctccattgccgagttccgctgctgttctcgatagtaagccgtcatagactcatgcttctgccgaacccacatccgatcctcaggggagacagcctccctcgccgcaatgtagaacggctggggcaacgacgaatcaggcccacaccccgtcgacagatgatccatcaacccaaagcataaatgtgccagatgctgcacgcgcggcgagcacgtctgatcgcgaaaaacccgacgcgcaagcagcaaatgcgctgtccagtaaaagcactcggtgaggatatccaggggcgtgcgctcacatcgcgccgggggtattccacggtatccggatccccaggcgcgaagctcggtgtcgagttggaaggcttcgttgagaacgcctttgtccggctgtgtttcgagcccgtcgctcacgtcgcaggctagatgcgcgattcggactagaaagcacatcaggggctgtgggcatccggtcatcttgtggaatgagggctcggtggtgtcccagcgactctggtcgggctggtagagtatgaatctttgcggggcgtagggtcttcgctgtcgggagatggctaacattacatcgaccatgccgaagcgctgtactgtcatgcgtgcgatggggttctgcggtatttcgtcgaagtagcctagtgcttgcataagccaggaagcgcatttcacgtggggctccagtacgccgtctgctgtttgtgcaacgactatcccctgaagaacgaccgctgtgagcaatgcttctcgctcgtgcttattgctggctacaattgtacccgagtcgcaggcggccctggcttcgatactgagcaaattctttccaagcgtcctgagcattcgctgctggcgcttggctgcgagatcaatgctggttaatccgaagttgagcatatgttctgtcgatatgcagacaatcgtctcgagaagaattggtgaggatagagctgggatagagacctgccggtaggggttgtccgggccatctatagcgggcacattggatgaaacgaggcttacgtctgtgcagatagtcttgattaggaattcctattccacttacacagaatgaggccacgtacaatattcccaggcggatttgtcttctgcagattcaaagcatgtctctgtaaaaagtgtcgagggtcgacctagcatgttttgttctgctcgacgggtatctttgcagcgaggcttatgccttgtcggcattggctcttttggtcgaacccatttcacacccaatggatacttgcagtccaaatcccgcgaagcacaaaatgcgcaaactggctgttgctcgtcacatttattgtgtttctttcggcatggcagacatcctgtcgcacattgatattagcgcctctactagccctaggatgagtcaccataccagtccgtgaccgtgagaacttttcgcttccagccatctatatgatcgaagaaatgatgcgctactgagtaacgagagattgacaaagaataagagtaggggtgttaactatgtgttccccgcagccttatctatgtgagagtcacctgataatcgaccaattagattgttttcacacgcaaaatgtatttcacaatgacattactttgtatatcatgaccggaaagcgtcaatgagggggatagtagtcgctgtagcgaattttttggaatttctaggaagacatcgcggcattgatttaccatacggcagcggaacccgccaaacatgcatatcgactcttcattctcattgattgggaatcgagtgggaaattcaacaaatttgattgtaagaagatacgatagagactaaactgcagagggcgccctatcccagaacctcttgaataacccgaacagttcggtcgactatcaagtcaatctcctcacgggtagtattataaggcggtgccaggataatatgatcaccattagtaccatcgatacccccatttcctggcatcaataaaatcgcatattcgggcttgagacctgtggcgtgtagagtccgagaaagcgcctttgaaggcggatatggctctttcgtctctttatcctgaacgaattccatctataatcatgttaataaataccaacaatgagaacgaagaaaacttacagcccagaacaaacccctgcctcgaatatcaccaacatgagggtgactatccagacgctcgtgaagaagctgacccagatactctcccatcgctcgtacgttcggcagcagattatcctcttgtataatctgctgcaccttgtatgcagccgcacaggcaacggggtgtccctggtatgtctgactgtggacaaaagcgccggtgcccttactcagagtatcgacgacgtgcttgttgacgagcaatccggcaatcggggcatagccggcaccgagtcctttggcaattgtttggaggtcaggaacgacgtcttcttgctcccaggcatggagggttccggtgcggcccatgccggacattacttcgtctagaatgaagagtgctccatgtcgctcgcagacggctttgagtgctttgaggtatccaggcaacgggggaacacagccaagggtctattgaaacagttagcatggttatcttggcgagatcaggttgtactcacagcaccgggcattgtctcggctatgaatgcacagacagtgttagggccaagtctttggaattcgtcctccagttcctgggctagtcttgcgacgtagtcttcggtgctttcgttcgcattcattccgcggtagggatagcattgaggcacgtggtgaatattcttcgaaagaagactctcatagatcctccgccgggaggcgtggtatccaacagcaagtgacccgagggtatttccgtggtaggacgactttcgagaaatgatgttaacccgctggggctcaggaacgggcaactccgtaaaatactgaatggccatcttcacagcagcctcgacagcttcggtgcctattgtgattttagtaaccaatcttggtttagcatggacagatttcttacccgagctcacaatgtaggcacgagacatctcgcctccagttgagtctaccaggaattttgccagactctccgcagcattgttggtgaaaaacatggaatagcagtaggggactttctttaactggtccaggatggcttcgtggacacgctcgtcgctgtgacccagacaggatacagccgcaccacatgttgcatccagaatttcgagaccatcctcagttatcaggtagctgcctcgaccaccgacaatgttcaagggctcatttcgtagctggtggtaaaggactccgctggatggtttgatgccagtggtgtcgacctgcttctcgggcggggtaggcaccgaagctgcttccagttctggtttatagtcacccattgtatggattgtgctgaagagttggagctaaaaaaaaggatgaatcaagtgatgctcactgaagatggatgtgtccgtttgaacagggagggcggggtgccatatatagactcaccccgccatggccagaaattaaaatgcagacgtaggacactgacgcttgaaaatagcccagacgcaacgccgtgattggcaagtctcgccttgtcgcacatcgtcaagttcatacttgggtacgataagctaatcccaaagaggaaatctttgtcggacccacgttcgtcgactgcaaagatctgataggttggataatccagaagatagagcttaatgataacgaagaacgaaactattgggatcgtgtttggatttcaggcaggtctcgtactctaccggctacacatatcactttcgagtccgagaaccgaccgcggcccaaacagacatcattgagcaatcagatacgaaagacgcaggttaccttgggagccatacacgcggactatatccgactcaccgtaggatgatacgcaatagagaccttatttgcgaaaccagcccgatcacaggcccagctacttactactagatagtaaattccccatcattaccaatattcaccgcaccttggctagagccgctctacataagtgcatgcagcccatgcgtacagcggttacatattgaaccgagcgagttgccttcaccggtgatctttaaatcattgctggccaacagatgccataaagcttggcacgacgcggctgtgccgttgaagaatcacgaggtcagtccttcacggatatatatttgccaaggggtgactcatagcttcatctcgtaagcgtaagataatagttatcttcagaccaagtcatttgtgcaactttacccatcgcgtaaaaccgagaaaatctttcaagcatatatttccaacccacaatggcatcatcctccatcttccccttccacgtgggcgaggcttcaaatgaacgcgtaaagctcattcccttcaacccagaccaacactgcgaaaccttcttccgcatatcatcgccccatcccgagatatacacacacttaccactactacccccggcttcagcaatcgaactcaaatccctcttctacagtaattccacgagccatattctgtctttctccaatccagagtcattcgcctttgccataatagacaagacgcagccgccgtccccagaagactctgaaggtgaactggctggcactgtgagctttattcgcacatcgccgacgaacctgtgcacagagattggattcattgtcgtcctgcctccgtaccagggaacccatgtggcaactaatgctgttggactcgctctacagcttgcatttgactccgcggagaacggaggccttggattgcgcagagtacattggtcggctagcacgatgaaccttgctagtgctcgacttgcgcagaggatgggatttgagaagatcgggatcatcccttggcatatgcggtttctaaaagggaagctatatgggaaagttggaaatggcagggagttgccgcctggaagcgatcctgaggatctgtggagagacacgttgagtcttactctgggatgggatcggtgggaaaatggcgccagacaaagggtggtgacggctatggagagatgagcagatgaccctgccgactacatggagaatggtcgagttcgaggattggatgtcagtcatttaggtgatttcggccattcgagagtgggaaatcttttcaggaaagaacagataggaaaagtatcccaccactcaataaatccaaatggaccctctggttcaatcagaattgacgatttgctctgtctatctgggtatcatattttctattaatgatatatagtaatgtgagggtgaataatttgaagtattgactccgtatataccaatgagatgcgaacggctagctgagcctttagctgcttcgccgaccatacggttcaaatggcaaagctccagcaataatcgccatcacaaggtaaagggctgcgcatatgtaaatcggcacgggcgtgctggtctgttactaatataagcattttcccaggagagcaaagagtaaagccgtacatttgcggcctggccgataacggcactcacgattcccatgatacgattgagtccaatggcaacgccatttcctgtgccccgatgggcggaggggaagacctatcgagtaattagatatggacagagttaatcaaagtgagcaagcacatgcctcgggggtgtaggcatagagagtaccgtagtacacattcaagcaaaaagaaatagcacacgtaaagcctagattctggctcgcagtgcgcacctgtgtatagcagaaaaagaaaaccattgtgaccacagctccgataatcatggttccccgacggccccaaaaccagggcgagcgacacatgagtcccgccaacacgggaccgaagatactacaggtattgttaatagcgtagtttcgccaggtaatatacgggctactctctccaaacattgcgccccgcgatgcaaggtaggtggggaggaacacgttataaagaggatacgcgaggccgatgaggagccaggagagccagaccagggtcgtagacagagccattttgcgagtttcaaagaggccgcggagatggaagaaaatttcactcggtgaaatgagccgcgcaaaccaagcagatcctggaaccccacgacgagcggtttgtccgcatgcctggagccgctcaatagtgaggctgcatgggcggttgtgtcgatcggcgatgttgcgtagaacgtgtagtgcttgttcatctttgccctcggaaatgaggaacttgggggtctcttcaaggcggatgatggtcacacggaggatggagagaacgaataccaaggcgccggatgtgtaccatacataacgccatccctggttgttttctcgagtacacgtggaagcgtcgctacaggaaaagttgggaagaaaggcccaagcaaacagacctgcgatgagctgacccagacctacatgttgtgagtcagttcggactatccataggaggtatactggagtgtaagctcaccccaccatgccgccatgagtgtcaatagccactgttccttgctaggaaggtactcgagaaagaccgtggtatcgagaaccaggttacccccagcaccgaacgcactcaagcagacaaacaatcccagtgtgacccaagagggagctgcccccgcgacgatagtgaacacggatgagataaatagggagaagttgaaggcaaaacgccggccgataatgtctgccgaaaagccccaaaatatggcacccaccaacataccaacataaaccgcaatggtgagcccggtggaatatgatgggttgaactccaacctggcctgggtcgaaataatggattgaatcaagagaatgagcgagtcaactgcatatccgaatccgttcaggcaaaatagtttccagtggtggggtgtgaaaccaatctcatcaatggtctgtatatagaggacaaagggccacgggttaatttcatgtctcattggtggtgcgaggatattgagttcccacatcattgataagcgtcatcttcgcagcaagaacctcgtccacctcttctccttgtaagatatcttggtctccattttgaatcgatctttcctccagaaacgagttcaccagatgtttgtccttgcccgctgtacctgtagggacaattgaaccggggaagtcttgagcatccattggcagcgaagggtaatgtttctgtgatttcctccaagctttcaacagaagagaaggctgtcgcagctagtcaagagagaatgaatgaaggaagacgagaaagttccccacgaggggcggggattcctgcaagcgggacagctgtcggcaagcaataatccggctaatagatattgcttcattagcttggctattgttcgtacgaaggtcgatcacccgatggttgaggtggccatgaagctgaacgctgtcagcgataaccacatggcgaccttgatgatttaaagtcatctgtaagaccatttgggcacctgcaagggacctttgatcttgacatttcagattctagctcttccaaaggcaatataagagcgttgcaaagccgcaagacttggcgcacgaggctgaacccgcaatcgtgactcgcagagaagggctggaggggaaacgacgctattcccgattcggacagattttggcgatgccttcactagacgacttcctacagaccaatcgggaacgatgatgcatccaaggcagtcagtctcagacatcccgagcttctctaataaatgaagttccacggcacagctttgcatcagccgcaagcatttccccattcgccgcggtacccaccaaaaacccatgggtgaagaaattgacgatgaatagactcggccagttcgtgtgaaaaggttgaagtggagaatatggaaagccacgatgtcaactactagtaaatgaacaagaaacatgaaggacaggtagggcagctctgtttgtgtcgggctgcgcaaggcgaaaagcgtgtgggatccaagcgtcagctaccaacgatttcctaattgggtaacatatgccgggattttactccgacctgcgtacgcctcaaggatctagcacagtataagcactggtgactacggagtaccgggtggaatatcgactcctgcgggatccactaagaatgaccaaactaagtgaccatgaagcatgaaagggtagagggatatttgggtatttagtctatcgcacaagatcactcaacattcagattgattcaaaaaatcaagaaatactcctcataacatccgctatatgtgaactgccagaaagacatgtgaatgtataatgaatgaaagtttagtacgctggaggtggcatcgtctccgtcatgacactgtgaccatattcctgctccagctccgacgaagcggcagcaagagtggcctctgaaggaaggttgacaattgtcaggtacaaaatgttctgcaaaaggccatggtcagtcaaaaacaacaccaccaagtcagcagggaggagaaaacatgagttagacttacgctcttgatggatcttttaccagcttccagcgccattctcttcttgcggaactgctccagacgaggctcgtagtccttctccaaccgcctcaactcccgatctgtctcggattggctacgtcggtcgttcaagatacgctccctccggtcgttgtactcgtcaaggactctcctctcctcgtcatcaattctgccggccttcttctgtgcacgctgctccggagtaggacttagcacgccgccggaaagcacaccgatgagacctccgttgacggccggatgattggggtcaaggtaccggttgctgaagccacgaccagccggcccgctcagcacatcgttaccgttctcggcggtgtactttgcgcgagcgcgacgatcgagatagtcgttgaagttgtcaaatgccttcttggccttgtccttggtcgaagtcttgcctccggcgggaacgacgccactcttggagcctggtgactcaggcggagaatcagacaggtactcattgtgttggcggtggttatccatatagacaagcggtgcgacagccataggcagaccgccaggtccctgcgactcgccggaaacataattacgcatccatgcactgccgccgccattgctcgagccgttggcagccagtgaggcaagctgcttgagacggctaggattcttgggctccttgagctcaggctcatgtttcataatcatgcaaaacagaccgtgaggtgcgaaaagctcgcggttgtacttgtccatgacgttgttggtcctaagcggggcgctgatcagcatcgtggcttgagaggagagtccttttgttgcacttactttcctctgacgtagcccttgttggccgcccaggcgcccgcttgcactgccgcagcgacgcccatgacgataacctcgggagtgaagctcacgccaagggagacgacttgcacgccggcgaggtacttgttgccctccaagcccgtgttagtctcatcgatgaagcgtaggaatgacctttggtcgatgccgcacaactccagagatggcgcataggcggccatgaagcctcgctcctgagaccctgggcgctgctgcggaatcacgatgggcagaggcagtggccctcccatggtggccatcccggcttgtgagtcgtacctggggtctggggtgggttgccctccaaacaattgggaccgggctgaagctgtccgtaaggtatttgtccattttgagactggccatactgaggttgaccatattgtggttggccatactgtggctgtccgtaaggttgtcctgtttgggaagatccgtaccgaggacgtccaggttgagggtggccgtactgagcttgattaggcgggtaagtagatttgtcgtattgtgattgtgagtgcatgcggtcctgcccatgcatgggcagcttctcggactgcgcgtacataatgttggagaatcgcgacacaccagtcagtactcggttgatgaccaagagagggaaaatcagatgtaagaaataagacaaaaaagaaatgaccccttcgaatcgtggttccaagatggacaagatgccggagcgtccactggaagtgcatctgatagtgccgtgaaccgaacatcctgcatacctctttgggatatggtcgtgggtggcctcccctctatcctgtttaagttagcagggtgcatgtggctctccgtttgaaactgtgcctatgtaccttttttgtctttatccttttaccagcgtcattgtggcagcccggagaattactcctaattgaggcaactcttggtccttgtcgacctccaacgacatggagcccccaaagggccggctttctatgcccgatgcggcaaacggggattcatcacgccagtggtgtttggcattggctgactgacgcccactagcgagcggcatattactctatctgcaactgaatactctaagtgggatgtgtcgtaccaagtgccgacagaacaaggcgtgtcatttatgaacaacgaaatgtatatgagctacgtgttggaagcttcagaaacccggagagaagacaagacattcaatcaatcaatcaatcaactcacacccatcaaaccgccaaacctcgattctatcttcaccactcttgcctaaccatataccgcaaaaccactcacacgtcgacacaatggctgctccctcttccaagaccgtccaggaccttaacggctcttggactgctgtaagagacgaaagatctctcacgtctgtgtcacacgagtcctgtttgttaaccatacctacagaataacaacctgtccgaggagtcctctgccgagatcctcaagctccagggcgtcagctggctgacccgcaaggtcattgccatggccaacgtcactctcatcatcgaccagcgcaaggacgagagcggcaacatcctgctcgacattgagaacaagcctagcggcggcctccctgccacccaggagaaacgtgtcctcaactggaagcccgtcgagctcaaccacggtctcttcggcaacatccgcggtcgctcccgcatctgcaagctcgccgacctcgacgacgactacctccgccagggttgggaagacggcaccgaggaggtcatgcacttcaagaccgagcacctcgactccaagggcgtcgtcacccagcaggccatcggcttcattgtcttcgacggcactcgctaccacgccaggcgggtcttggtcaccaaggccgatggcgagaggcttgagaccaagctcgtctacgactaccagtgttagatatagaaacccggtgtatacatcaaaggacacagtaaactagctttgaggcgatctacatggatcttttcatttgtcttgacgataccgttgctacataaatttatgaaggtatttttgcctacatgagtcccttgctaaattcactttggaatactttggcatacttcggaatacatgtctctgtgcgttttctgtctgtcaaaagtagcgcgcgtgtttcagtgatgataagttgctagacaagagacagctcagaatagcataatgtgcaggtaacatagacatatggtctcgaactggcttgtgaagtacctgcggttcggcgatgggggcagaggaatccacgaggcaaggctgcgttaggcttgtcaacttctctagccgcaccattgcctggctgctggctctgacatttacctcgtgggaccgacgagacagggcaaaggcgagcgaatagggttgtgtgttaacatgtgtggggcttacggctgtctgtatgtacgattaagcatcgtgggtagatccgaaccgcgcctctgccaaggagcgatgggtcttggccaagtgtcgaaagaaacgccgcaaggatactagcatccctggcgatattgagcatacacgtacatacgtacgtagcgtaaataggtaggtatgcttcaaaccagttagtcacaggggagaattgtacagtctagcggccaaatccgacgggatttttggggcttagccactgtggtgtatttaggcacagcgtttttcgccttcaaatcgtcaattcgtcttgctttctctttccagtccttgtttaccgtatcgttgtccgaatctggcattcacctcagccttacctagtgtctccacgcggaacgggacagtcccgtactaagtgcgttggggttgatgccacatttccccgcctatccatcgacaatcatcatcaccacttggtagaatcgccatcatggtctactgcggtcgtccttcaacaagttgcagcaattgtcgcgccaagaagagaagagtaagtcattactgtttgccccccttgataaaagacagaaaatcatcagggaaaaaaaagtaaaaaagacattttggctcacatttagcctcaaaaaaagtgcgataaagcagtcccagaatgcggccaatgttgccgcacgggtcagaaatgccccgggtacagagatcccttaagcctcgtctttcgcgatgagagcacccaggtcatcaaccgcgcccgatcaaaagtctccaagaggacttcgacgggcaccccaaccgaccgcctctcggtggagcgcacagacccatcacaggcacagaaccaacaacaaaacacctccacaccggactatcacgtcagccgcccctccgatgtggtcgacgagaccatgctggagatgagcgacttcgatgtcggagccgggatattcgccggcggcagcttcatgcccgagttgatgagcttcaacgaccctttcaacctggacgagactggactcttctccctccaccaggatgcttcgcccagcgccatgccggtatcgggcgacggtcctggatccgctgcttctgtttctgcctccgcgtctgggcgtcgttcccgtgtgggcgcttctagtgtaggcggcgacgatgtggctctcaatcagttccctgatgacagcagcaaccgcggcgaccgccaacggctaggacacaacaatttcaccagcagtcagcccgaggtcatagcgcgtcccttctccgtgcctctcgtcatcaccggtctcaatttcttcctctctcgctatgtcgttcggcagtccggtccctcctccggcttcttcgactacgctccggccatgctggcgcaagacgacggcggcaaggacatgctcgagggtgccattctggctgtcggcttcagtgggctcgctcgcaccactagccaggccgacctgttaaccaggtctatgatgatgtacacccgcaccatggagcgtgtcaatctcgccctcgccgacccacaggccgcctgtcgcgacagcaccatcgtctctgtccttgtcctcgccctctacgagttcagcagggcctctatcgacggctggaagcaccacattgagggtgccacctcgctactcaacctgcgcggccgctcccagttctccacctcgaccggcctgcagatcttcaaggatgtcttctcccagctcctcacaaactgcctgcgcgccggttcccccattccctcgagcctacgcatgctgcgcatcgaggccggcaacgccatcagcgtctcggatccctactgggtcgcctgcagcggcatagtcgagcttctggatctcttccagcacatttccccgggcggctactcgttctttcctaactcttacggcgccccctccgctcccgccgccccttccaattcctctaactccccctctactgcctctggttcttcccccgcctctacctccatgctctccggtcctctcgagggtgccaacatctccatcgagcacctcgagcgctacctctcacaggtgctcgagattgactaccgcctcgagagtgccttctccaggtgcccttccgagtggcagttcaccgacaaatccaactcgtccagcagcaactacgatccgactggcatccggcgcgatgccaaccacatctaccgcgatgtctggattgcctccatctggaacggcatgcgcatctgccgcatcctcgccaaccacgctatcagccacctcctcctccgcggcgctaacatcgacagcaactggttctttgccaacaactacaccgaccgcctgcaccaggccacccagaccatcgtccgcctgcgtgacgagatgctcgcctccgtgccccagctcatgggctacgccacttccccggcacaggagctgcagcagcacacgcactccaagaacaacgccggctcggccgtcggcggctactatgcctgctgggctctccttactgtgggctgcatgcacaacctcagccacgagacccgtgcgtggactgctgcccagttgcgcagaatcagctgccaagcaggtcttgcgcaggcagatgatttcgccaaccttgttcaatcaagcaacctccgtccaccattgagttgatagtatggaagcatcattcaaatctagatatttcatacagcgatgaactggcctggcgacgacggagaccggtcaaactatgacctctttgtgaggcctttgatggccgatctcaaggcatacggtgctcccaaagggcttgtttgggacatttggaatgaaccagacaatgagaacttttgggttcgctcccagcagcagttgatcgacttatatattcggacacgcaaaatcttttggtaagtggttcttttttaagaaatctgggcgagttgctaatacgcagatattgaagatgccggctttgatcaagttcaactctctgggcctacgcttgcttatagccccgtgtctggcaacaccttgtgggccaactggctggcccatattgcaggcaacgacactattccagagcagtacgcatatcacttagaaggagggacgggtgattgggacaatgacattcaaaacacaaacgtactttgacagcgctactgaagagcgagggccttcctgggcgtcaaatcagcatcaatgagtacgccaacatggctgaataggtccagctgggcagcctggtggatttttcgactggagcgctacgatgcatttggactgcgtggcagcggttggattcttttcttatagagcatacaccgaacatatagggttacacaagtatatatcctttcacaaatcaaaagttaaaccgagttaatcaccatgtccgggtggttaagctcgtctagggagtcgacgtcgatggcggtggacctgcgccttgccagaggtgagagagtccttggacgtatgaaaagggaggatacggacgggagttgtggggttgggaaatattacccaaaatggacagcttggagtccggcaaatggtgacagaaacggaatagcggtggcggtgcaagagaggctcacgcacagcccaaaagatgacagtggacccttaccgccaaggagatctctggggcaggtctccacatcttgaatctattcctaatggggtatgctcgatgttcgttattccacatggagatgcccgaaaccctcaagttgtcattgaatgcctcgttcttctctgtgtttaagtgcacagcccgaacgcattgcaagcttttcatcgtacacctactccaccatgggaggccgctctcttattttatcccctggacattttatttattaccctcgtagctggtgttcaaatgactcttaactttcgccctatccttcatacttgtttcatcagatcataccgattgtccagggtcttcaattcctgccctgaccttataatctagattgccctcaatcagctatcagcaagacacctacccactatattcgccgctccggcccctctcgatccaagatgacgtttggctatcaagatggtatcgctttgttacagctcatcgccttcgtgccctgtctcttcctcgccattcttttgtgttaccagcaaggaatgaaggccgtagcatcatgttggagattcctcattatcctcgcctgtctccgaatcgccggcgctgtatgccagctcatcaccatcactgacgactcgatcgatgttgtcaccacaaaaatcacatgcgacttgttgggcatcgctcccctaacactggctgccgtgggtctgctacaaagagtgtaagtcgcaacctgatatccacctaccagcgactcgagactaacgtaggcaagtcttgtccagaaacgcctcgatcaacaagctctccaaatggatctttatcttcgtcagcatcgtcagcttggtcgggctggcccttggtattgccggcgctatcaaggccctcgatagctacaccatcccccccatgctccaggccgcattgggcatgttcgtcggctgcttgggtctcctgctgaccattctggggtacttgaccatctaccgcaacgagatgcctcgcaacgagaagatcatcctgtactcagtctacgcctgtgcgccactgctcatcgtgcgcaccgtctacggctgcttaggtgactacacgaatatcgcgcggttcaacctgtttgagcccaaccctaccgtcaatctctgcatgggcgtcctcgaggagattatccttatgattatctgcctcgctgttggcttttactgccccccgcccaaggaacctcaaactggtaagccttgtcgttatttaacgtgattgattgttttcgtgacgaatatacgctgacaattcttagatgctgctgatacgacgaattcggatgagaccaacattgtggagaaacgctcctctccccccagcgatacccactccaacaccattgatgctttgaataaggagaaaatggctgaggaggggcgtatagggacctcgactgccgaggttttataagatctggctatccctttataccttacaaagcatctataaccttacactgtctcgggaggcctttcgttataataatacactttgggattagcccctgctgtaaatccaaaaatctaacgaatctctttttcattggtatctctttagcgttaagcacccgtctatttgatataagcctcaagaactagaatagaatactagaaattgctaaatactaaatacccttctaggaacgtttctaccactagggagaaggcctttagcagtagtttctcatcgattcatacattatggtcgagaaataaagactcgattagaactgaaggaatcagacagtcctccgtacagagtcctattcgcgtaaacgctctatcctcgatacagtacgtattattagcagtagtaactcccgtatcacaaggaagcgtatcattcttccaatcacattcattaggagtgctcgggacggacagtgagaggatatagtagagaataattatttttgatggggtatgacgggcagaactacccgcaagcggtaggaagtaataagccaataaaacaacaaaacagcccgaaggcggtctaaacaccataatgttcaacaaactacccatgagggatgggaccaacctgagaggtcaggggatcccgacctgatctctccgtgcagaacgaacattaccattctaaggtattctgatataatatgtcttgaaacatggtagttgtgccttttcggaactaatgtcttgaaaaaagattcatatttgagcgcaccgcgcaaccattcctaggtttccacgaagcgtgctcaaaagagtagggatcgattgggcgatttcatctcttgatgtcaagcaacaataagaatgttctaggtagtgcaatcaaggtgatggttctgtccctctccctcggaagagagccttgttcgcgtaaacatgaatgcacctagcctgtggatcctatgccttctgagtagtccatgagatctcataatggagtcgagttcgaggatgctcaagagcttattatttagctactgaggtagacgctagaatctagtgataggctggaatcactatgctggcggtcgtgtcatctggatcaatcgccgggccccgcgttgaggattggcctgatcgcatagttgttttaggacatacaactaagatgacctttctgaattggatattcttttgttgccaagttctgccaagttgaaaaaagtaaaagcatcgtcctttaacagtttcatacattattctagtctatgttgtggtagcacgtaaaatactaaggaattgcgtcttagcacgtaaccttgacaaagcacatctctgtcagcaaaacaattcaagtcttctcttggcttcagagataggctgcgcgctagcaaggatcgtgcatcctttcctatgcaagcttgcaggatttaaagcagattgcgtgagtattgcgcaacattacatcgaataatcgccatgtctgtactcaaaagaccccccagagaaacctaccggacgtaaacaggcctagtgtcgggtttcatagctatctctggcctcaattgccggacatcaggtggatgctcttacgatctctcagtgacgcgattatcaggtacgttgaggacatatttttctagttttataaaatcagtagaatcgccgggattgatctagactaaaagacctggttcatttatcaatctatgcactagattttccagcgccacacaacccccaaagcataatggggaccgcgggtgattctcgacaagccacggccacctcgatctacagcatagatgcggaaaaccagaccagcaacacccagacagatgacgttggaaagcctgtcagatcatggaaaagttatgtgtgggatacgtgggaacttccgcccgatcaacgctggatgctttttaaagtagacgctttcgtcctcacgttcgcgtctatcggatattttttgaagaatatcgaccaatcaaatgtcaacaatgcctttcttagcggcatggaagaggatcttcagatgtttggcaatcaattagtaactagtatgtgtcttcgttctcacctgagacgtttttaccccttcttttcgacgagatcgagaaggtttccggcatttgctaactacgactgtttacaggcacatctatctggactgtgggatacgttgttggccaaattccgtccaacttgttgttaactagaatctcgcctcgatgggtcatcccctcgctagaggtaggatggggactagcgactatttgtacatcaagtgtcaaatcgtataaagcgttgtatgctttgcgcttcctcgtcggattctttgagtatgtcgatattccgagattctatgcactctctatggccacttactgacgccgttatagatctggattttaccccggcatccattacttactgggatcatggtacacaccacgcgaaattggaaagcgagccatggtcttctggctcgccggttcagtcggcactttgttcagcggtttcctccaagcagctgcttatacaaacttgaatgggacacatggttacgccggatgtatgtgaccgcaattatccttgttttttctctcccggttcttgaattcgctcataccgcttcatctaaaaccaaacgaaagcaagaaactaactgctgacggatgagaatagggcgctggcttttcattattgatggtatcattacgctaccgcttgctctcgctgggtacatattcttccctaaccttccgcaaagcggtaaaaagacatggtggacgacagaagaggagcatcttctgtcaatcaagagaatgcagaatatcggacgtgctggcaagcagccttggactaaggcaaaggcgaaaggaatcctgctgagctggcatacttatcttctccgtgagtcgtacttcatacctttcttatccttgaacaatactgacaatgtcccacagcattgctatacattctctggaacaatggcattccccaacctgctatgggatactggctgaaaagttttaatgcccatcctgctcctctccccggaacaacttacactgtcgcacagatcaataactgtgagttcgagttcgactccgagttctaaattccaatgaacctagctaatttcatatacaagtgcccctccccacgactggtgtactcatcgtcatggcattgatttggggttggctgtccgatgggccgtgtcgtggcgctcgctggccatttatctatatcggcgccgttactactgtaagtcaaagagattttatatctgtcaattgggtttttattcagtggccagcaactaaaaccattcacagctcattttcgcctccctgatgatgaagatgcccttttacacaaacctcaaaggccgcatggttatttattggctgagtaatattggtgtaagtctacaattctgtgaaaccttcaatcgttaccctaacaatgcctttagggtggtgccggtcctttaatcctgagctggatcaacgagatctgctccgatgacacagaaaagcgagcgttgcttgttgccatggctaatgaccttgcctatgttgtacaggctgtcgtgagtctcctcgtccttttcactgattcaagctagatactaatgagcgtgaacgaaggctcccaatttcgtgtggaaaaccacagcatttcctcgtgctcccaaaggatatacttggtcgatcgtactgcaaatgttgctcagtaagaagcccttgctccgtctgattcttgtttcccactaatgataatcccagtcttggtcaccgcaactattcaactgcttctgtggcgcgataagaaaaaggcaggaaaggcagaagcaggtctttcagccattgacaccctcgaatcatcatctatagagggagatatatcggtaggatctagagaggacaacggcaaagtggctagcacttctcgggtcaaacatgttggcttggattgattcaaaaatgtaactaaatatctggtgtgtcactaatccccttttaagtctggaaatgagtcaaaatataattcggatgtgacatagtgaatagaacgtaagatgcataagcatacatacatacatacatgattgcggagcgaagcgaagaaatattaaatgacaaggtctaaggtgtatgtcgtgaccaagttgtctattatgggccgttttgatgtccatcaggtgacctgggtaaatgcactagcttcaatacggctagctcatggtttatggaccaatcaaaatgaattcatactatactcataggtaatgatcattcagtcgttgagcatagagagcagatggctctgtccaagcatccacctttctctatcattatggcttccaaaatgttggggttgtcaagtgccgatcacatgccaatgcctggtttgtcaggcttcacctagctatttaagctagatctcgatcattgtagagaaccgaactttcttcatctctctctctctctcgttccaagacaaaacatgtactagatgcgttcactcgcgtcctttggagctattcgctcgtgcactagcaatcgagagaccgaccagtgtcaatcttgtcgagatgccaaaaagagagagcgttctagacgccgtgcggctatcgagctggggagaggaaaacaaaaataacgtatggaggagagttgtttacgtgtggcctacggcacccctctttccccgcactctctaattactacatagcctctcacttcacaatgactatctggaggcataagaccgacatccctagtaagctattccatttatatccacggagagatggttattgactattaatagtgcaactttcttctttttgtctttcataccttacaacacctcacaaacaactaaaattcactaccagccacaagatccttttctgatttcttcattttcctttgtatcatcagtccctctcgttttgccgtttcaagtcgcagctacttctcgtcctgaaatttcttcttcgggagcgttatcatctggccgtacttcgtgccgaatgctttcctttgccttcaacaccgccatcccacaatcgagaaacacaagtgcccgtcatgctcatactcgaaggtaaaactccgaaagtggtccatgagtttgagaaagttatcgacaaaatgcctgccaagtttcagatcaagataactgatacatttgagagcaacgcatcggccggcatgtttgtccgaatgacctgggaggtatacgcccgcttactgtcaaccgtggatatgaagccgttacttccagttgttgggccctcgcttatcagggcccagcttctcttagaggggacttatcctagctttggttaccttgtttccctagcagacgatcaatgaaggtgcgcagaataacttgcagtatatcctattgctttccaacaggaacggagaccaacgatgaacggtaatacagacttgattgttgatagtacctatattgtaggagcattcaaatccatgggatgaatacctccatataactaatccgaagtgagcatagtaaccttggaagcataccgacggcatagtgtagtggatccaataagcttaatccgataagctaaatccgatgaactccgaaactccgaatttcccccgctttctccgagccgcctaaactccgatcttcgtcatacccgccacagttccccttgtcggtttcatctctttacaatgcctactccgtaccggacttctaactccgttatatgaggtaaattctgcaatacaatgagtcaaagcccctcaaaccgcaacgggccggggctagcgcaaagtcctgcgtctcatcgccgaaagcgaaaagtccttagttgcgagcattgccgatgctccaaattaaagtgtgatcgtaaacaaccttgtggtgcttgcacgcggcgaggatgcgagctgtcatgctcgttcttggttccccccagtgttgcaactacatccattcacattcatccaacaaagtccaatccctcgttgtcaaatgtgccatccaggaacacctccgccaccccctttgcctcattgaggcaacctgctactagttgcttgaataataggtctgagcggtcaggtcctgacgaaatccaagattcccacgatagtcgctgggaagcggttctccaacggccctttccggaacatgatcctgtcgcagcaactgatactttgtctcccttttcaattggttcgagtatgtcgcttcaagatatcattgaaattttgccctctagaacgagctgcgactgtctggtttctcatttcttcaatcacatctctgctctgttccccattctccatggcccaacattccagaagcagtatgttgcattcatgcaacagccctatgaagtggatctctcttggctggctttacttttttctatgtgctctttgacattgaacactatggagccaagtgatcctagactggtcgatttatggccggcgggatctcattccaaggagcaagaggctgtgactttgtcccgccagcttcagcaaactgcgatggtttgtcttttacaagatcaatttttcatccgacataagctcagcacattcgaggctttgctgatggtgatatataatctttctcacaatgagtctgttgatcaagggtgggccctgttgggtatggccttaaatatcggcatagccctacggtgcaacgtcgactctcagggacttaaccatctcgagactgagagacgccgacgctgctgggttggtatattgactttacatacctaccaagccatcctatttcgggatatcgacatgacattccttcttgatataaaaaccacaatgcccgcagacgtgaatgatgctgatatcaccaaagagggaatttcgcggccttctagttctcccacccagatgtctgtgatgatgttcaaagctcgacttttccggatctccactcagatctgtcaccatatatctggtccttcacgacttgagatagagccattgaataaatttgatgctacaatcgccgaggaacaacagagatgggactccacatatctggtggatggtgccccaaacatattggattccagttacgcctattggtgcattctacaaacatatgcacatcaactttatcttcttctacatcgccccttccgccattctcagtcatcatacttccttgcaacatccagagagaggtgtatagcttccagtgctgccttactaggaatccatcgccagatctacgaagttccactgcttcgaccttatctctggttgcttagaggagtcacgagtttaaaggcacttcacgctgccgtggcgctcaattcgtgtcttctggatatgccatcgtcttttgattcaagctcgtaccgggaggagttaaacttacttgtgcttcgaatggagagcctttctcgtcgaagtgctatttgcttgaaggcgcatcgcatacttcttcaattacagtaggttatgctctacgtgatggcaagcaggtttaactaacgaaattttctaggactcaattcggcgcagaaaatccgcaactaccaaattcggggactcggatcgagagcacaattgaagactggactgatatgcgggaatggtttggaccggatctttttaactgggtaagacatggaacctgtgattgtttgactctatactaacttacccagaatttagataatgttggcaatcttcctgcagtttgatttctcctttacattggatggtatctccggtgattccaatgtgtatcaaatgtgttcgccacgctgactagttgttaaaagtgaaattagattcaagttcaaatactcttcagtgggtagagacgccatcaaatagcaatgtgcaaccaattgcaaagtacaaagtgcatgaataactgtttcttgacatttctttgttgcataccaccgactggtgatggaacgatgatattgatgtttgattgacctcaagatatcagatatgacgtatcggtcttcacttcaaagtaattgtgctttctcggatatcatattcaattgtctaaatcttcagttgtactgttagacaaatacgaacgagaactccttgaggagctaaatcaatatagcagactcaaaaatcgaagtctatatattgagattcaggtgagggaggagcaagtatcagccgtataaaacgaccaaaagcttaatcagactgatccagaagctgtgggtcattctttcgatcgcagaaatccccctggcttacaaaatggaagtccgatactattcggccgaaaagtgactaggactgaccggagttcaagtgcatcggagaaaaatgtggcaatggttcctacctatgtccgatgcgccgacgatcaaatccggatttggctgataaatactaggggccaaatgaaatgaattcatcaacagagcctatgattcacggcccaatgactgccttcacttaaatccggtagcttttactctatggggctcactgatagttaaaatttcggtggctttctcttcttagcccactttcttcttcatattcactgccggtcttcagttgttttcctacaatggaatcactctttcaatatcgacgtatcagacaatctgttcgcgaccaactagcggaaatcaaagaaaagtgcacctgcgagaactatacacccgggtcaccacacagctcgaggtaagtgatagctcggcgaagctttgcaaatctatctgtcaacctatgctcatactccattatccagctgtcagtcatgcaacgttgggttttcttttccgccgaaccaatcctcgcttcaagcaaaaactcctaccgattccatcatcattgtggactgggatagtcacgatgatcctttgaaccctgcaagccagagcgtgtcgcagaagctggttatgacccttctggtctcgttacttgctttttctgtaactgccacatctgcgattgatgcttctggcgtcccacaatacagtgaatacttcaacgtatccgaagtagtcgggtctcttgcaacaggtaagtacagacctttgaaatgattatcccttttgcacaagttgaccgttccaacagccttatttctggtcggtttcggggctggctctctcctgtcaggcccattctctgagacatttggccggaatgccgtctacctgataacaatgctcctttttctgatttttatcatggctgcggcactcgctccaaatctccagggccacctgatctttcgttttcttgccggcttctttggctctactccactcagctgtgctggtggcacggtggcggatttgtggaatccagtacaaaagacgtacgcttttccagcctatgctattccatcatttgtgggacctatggctggtcagataataggcagttatattcctactactttgggatggcgttggcttgagtggattatgcttatcatgggaggtgcgattcttcttattgttattgtgttccagccagaaacatacgggcctcttcttctgtactggaaagcaaagattctccgcgaagaaactggggacgagagatacaaagctccgatggagatgaaaaaccaggctttgggcccgcgactgttggcctcggtataccggccatttgcgttggtttactctgagttgattatcatcctgatgtcgctgtatcttactgttgtctatattgtcctcttcacctttttggagggatatacatacgtttttagtcatccgtatgggctttcacagcagatgactagtatactctgggtggggatgctatgtggtattcttctcactagcttcctggttccggtggtttactcctggactgccaaagagtacaagagaacttctactattgctcctgaagagcgactgtggtatgcaatgctgggtggtgcaccagcggtgccaataagtttgttctggatgggttggacctgctatgtaagtgcccttgatttgttcatcattgtcacagtcactgacttttgcgatttctccgtttagccgtccatatctatttggtctcctctcatttcctccgtcttattcgggttcggaatcacgactattttcctttccacatacatgtatatcatagattcctatggtgtatactcggcatctgcattggggttccttgtttttactagatatgtcgtcgcaggcggtatgacagttgctggtgggcctatttaccgttctatcggtgcgcattatacattgaccattttgggggccatcagtacagccatggccacaattccgtacttgctttatgtgtacgggccgagaattcgcaaatacagcaaatttgctgtcaacaccggtgcggaatgatgcttgaaactcggcaaatcccatgcgaagagctttgctgcaaaattttatgcgttcagcaaaagactgttaattagatactgaattagaatttagagctcctaatagaatcaatcaatcaatcaattaacctgttgcagtctaactagctgcgtatgactatgtaggcacttctctactgaagcaagaactcgaagccgaacgccgagccagtattatccctagagagtcatggcttaataaaacctataaaagcctcctgtagctaggaggaaaattccttctatctctgctatcctacttctttttccccctccttccctcccttcttactactattcccgctctcccctgccctagtagtagtagtagtagtattctagcctattaattggcttattcgttaacttttactaggtctcttatctcctagcctcgttccttattattagctaatatctattatcttctataccttattccctaaactcttagcctattagttcctcctcattatccttcttagtatctatttactagaactattaaaggagacctatttggtgtctaaagttagctctatagtaggtagcctataggtttattatcatctccaatagagactgttggtacaagaactgagacatcgatgtgctgattttgcgccactattcccaaaatctgatgaacgctttgtccccgagttctggcgggcggacccgcgcggcatctaaatatccgctgaccccactttccactaggccaaatccttcagtgtaacggataaagataaaggtccgtacaagagggaaacacatgtaagcctgcacaggctcgggaaggaacatctatgtcatcgcacatctgtttcgatgtcgatccgtgaggggttcatcacatgagcataggccgatagatttccttatagtttgagaccccccggtggcccctcgagactggcaagaattagtcttggcacactatcaatacattgtgttccctccacaaagccctttgtatcttacccggttgacaggccttacacctgcataacgtttatctttacattcagatcccagcattgttaacaatacctttcttttccaatcagatcagatggaggtacagtaccggaatctcttagcaagcatagactccggccagatactatatacttatcatagaatagaccgcattacctacagctgaagatgatcataacgtcagaattgttattggagccaccgaatactccgtggatgtaacaaaaatgccttattttgcatcatttttaaggtttcgacgatcttctggtcaagaggtggcccaattgccaacgcatgacgaaatacccttcttcgatataattaacgagggcgtgaagaacggattccgccaattctttcgccgcatgccaacacagatcaatgactatcgcattctctgtgaaactctcgaatttctctgcattgatatcctctcaggtcgcaatatgcgtgatatcattcacgatttcagaaggggcaagagtgattgggatccaagggagagaattgataccggaggattgagaagtttgacacgagactcggcttttcggcttctataccagtttctcctaggtaaattcgagtcggaaatcaaggacagcaacatggcatacaacgcaaccttgttcgtcgtctcccatcgaagaattttcaaatacaaaactcggaaaatggtccgagatgggtttgaggaacggtttcaagtatcagggaagcagctacaaggactcaataagtgggcaatcgacccatcttctcctggaggcatagaagaggaggatatgtctaccgagccagaggatacggttttcgattcggattggtcatgctgaagttacagtaggatactggaccaaagggtaaaatgagtgtaattctaaaaaggagtgttctccgatgtctatcttggtgtgtgtttacaacagcttaccctataaagattcacccacccacttttctagtgccgtatagatctgctaatatttccctaattagtcttagtccctagtattgagcttgtattttgtattatatagagtccctctaattcctctcttctatattgtataacccttgaatttgtcaatttataatatgccagatgaatgctaggcagttagtgatgcacggggaccctactatatattaaatttagggtcgagagcaccattgctcggatattaaactactttgaatctgtaaatataccgaattatataccatgctacttatgcgcccaggaaaacgaagtggaggtgggtgaatctttatagggtagactgttgtacaaaatcgcgacaagtggctgctgactactaatacaacactagaagtaaggaacgtacggaagtgcgtcatttctggtcgacacaaaacgatgcctcatcttatgtagacctttttgtatggatccgacggacctacaggtcaccttacaacaaacttctcttattactcttccagaatagaatactgaaggcagcatgaatgacctggaaacagcggtctagataatgcaagtaagctacatggataaatcagggcaatactatctcgtgtaccggaagggtacatatgcgagcagcacaggataagtctgcatgaagtgggtgtatacaacttcgacaaaaatatgaaataaaaagaggtaattaaaagaagaaatctcgagaaaatagatccgccgaccaaaagtgaggaattagaaggcgtcttagatgcacgttgaccttgaaagcacgttgattatataatctcccgtgatcaagtcaagctcaaaagcggcaagaggtgagtactaaaatggaaaggggaaggcagacctatccaccccgttatttttacgatgcgggggacagctagccgtctcaataacaccacattctcccactggaaactatcaatggactgaactaggcactacctcactcagattcgctaagagacatctcaatcccaatcgcacccgagacaaaccgccatcatgacctattcagcgcccccatccaaccccgcaacctccgcgaaatccaatgtgaagaatatctccaacccgcgccgcctcctaatcctgacaccaacatctcaatccctcacaataatccccccactcctacactccctaactggtgtgcccgtcctcgacccgccacaacagccagccccttcgccaaccctgaccccaaccccaccacagccagcctcaagctcaacaccctcaccaccaacaagcactttcgctggatacacaacccacagccctctccgcctcgaaacaaaatactacagaacagaagttcccgtatgggttgacgagatcccactcgcgatccacgatacagatgcacaaactactcccacaccaacaccaacagccgagcaatggaaaaccgacttcttaagcacagaagctgagatcgtgcgcgaagctgtcggggctctagttgtgtgcgcgcatactcctagtgatgtgacacctttaccaggctccaatgcaaacgcagaccccgccgagcggtccgacgtgcgcgcactgcgtgacctgatgcgtggtgttggcgctgtcaaggagctcattgatgaggagcgtggcgggctcggtgatgtgactggtgtgtttgtgttgattggggggaggaagggtgctgcgggtgtgggtgtgggtcagccgagatccaaggatgccgatgcggagctggggcttggcgttgatgatggggatttaggtggtggagaggcggcgccattttcggttgggtggtgggaggatcagctttttgatatgggattggtggggtgggaggttgttgagtgggatcctaaggagagtttggatgttgagacgaggaatcaatatggaggtgagttcactgaagcaacccacccattcgcggttgagcagtagtattggaggaaaaactttgcgcacctggaatatcggagcaggaatgatatgcctcacctgcgaatgggctgtatggcaagtttttggattttagctgacttatgctacttctagaacgagagggtatgcatcgtatcaaagaggtccttgagactcatgactggtctatggttgggggtgacgatggctttgacgaagataatgaccctgccatggattccgatgatgatcttcaagaccaactattaggtctgggtagctctcgtgggtttggtgatgaggttcatgaattagagcgcgaaatgttcggtttacgcatggcgatcgagcgtgggggtggtgatggtgatgagagagatgattctgacaatgatgatggcgaagatgagtttgatgttgagagcatggagacattgatgatgcgcatgcaggcaatcaagggtatgattctatgttgatttctcaggctcgctatagttgatattgcggtgtactgacttggcttagatatgagctccgagctgccggagagcgaacggaaacgattcgctgcgaaggccgtgcaagatattatgcgcgagctctgagattacttgttagtatacatagattctaatctgaatattgaatgatcatatttcattttagcatgttatgtagaccattcacattttccaccttcccacggcctatattctgttttgtgactaattcttcctaccatactagcgacaacaccaataactggggaaatatctaaaatgactttcaaaatgaccaaaaaaaaaaaaaaaaacatgacgatagatatagatcccgcactgccacaaactgagccacaccgccccaaatgtggagacctctatgcacttctgtgacgtcagaatattccaaggcacgaagccaacttgacaacgagctatgtaccgtgcatggatcaccctggttagcttattgcttgaatgaatcttggcctcactacatgatcttccccattctccacatgttgggtactcgaaagcgccgcgtcgtcatgtcttgagtctcctacacgacataccccttattcaattcctagtctacgacatattctctctcattacatgcgacctgaacatacacaataaccaattggacggacaaaacgatctcttgttttcaatatgcattttccggcacggagttgcgcccctatcctgtcggcgacgacggggaggatatcacaacgtggtgctcagtacgcctcgttggggaagattggctcggctgggatgaatgaatggtctggtaacggctcttctgttttttctagacatatccgttcattctcagggagttgtctcaccagggatattggtctcggggcttctggcgcatcaccggtaacgaagctgagatgtgctgggccggctgcagttccaggagattgccttgcctggattcagaccagaaaattccgcactgaaactcatagacaagcctcaggcgataagcagacgactgaagagctttgggagaaattccaagttaaagagggcaatcaacaagctcagcctcggcggacagttcttagggaggatggcggaaatggaaagtcactgatggaaggagagacctggcctgaaaggttgaccaaaggtaagaagggtggtattatgattgattcgagtgacaatgctgacttttggagataggcaaaatattgacgaccccttcgcggcttttcaaattgatcattcctttaaccaccgtcggcaacgacggtcatgataaaggtatgtcggtcttcaacattatcccgtcacttggccatcatgctaacagtacaatcagaagtcgagcccatagcgatcctaatccaccctcaacagccgctatcatacttagaaagcttgattcagtcagagctacctccaatcaaaggcaacaccgacaagctccgcccaccagccgtatccttcatcgcaatccagcacgacgacaacgctatcaaacccaaaaagcggattgagaacgagatcgacctagacgcaaaccaaaagaaagaaataggcttcatccccggcaatgacggccttggcggtagcaaacccctgaacggccgatcatccacccagtaccgccggtcccgggaagaagacgtcgagacctacagctatccacgcaaaacaaacggcaaacctgagcgcttcgtgcgctggtcacaggccacagagattggcgacttcatccgggatgctgcgcacgcgggcgagttcatcgtgacgattgaagacgcgccgtccggcctaggtcagatccgcgtcacggtgccgtcgttcaacgagcgcacatattacctgcgcatgcggctgcgcaagctctcacggcgcattcaaaccatggcggatgtgaaggagaagtgtgatgcgctggcacatcggggtgcgcagcgggttgcgatgagcggatttggaattcttgccgtttggtggtttacggtctataggttgacattcgagactgatcttgggtgggatactatggagcctgtcacttacttggtcagtttgtctacgttgatggggggttatttgtggtttttgtatcacaatcgggagatttcttacaagtctgccctggaatttaccatcagtgcgaggcagaagaaactttatttgttgcatcatgttgatttgcagctttgggagtcattggttgatgaggggaactcgcttcgtggggagattaagaatatcgcggctgagtatgatgctgagtgggatgagcgggctgatgagcagcaggatcagcgtgtaacggaagtcttgaagtcagaccgtcggcagaaacatgagaagaagaaaagcgaggatgataagaagagtgaggatgacgattgattattttgatctgttcattctccctaagtgtatgtattgcattccattccatttctggtcatccgatggtctccaagtttcatacttcaattatacaaaatagacattaaaccgcatgcatatgaagcgaaaaaccagaacaatttcttccagaaacactcaatcccaactatcacagcgttccattccgcacaggatcgtagtacttcttcggctcttcctgcctcgtacgtctgtctatatatcaacatccatcagcatcgccttcaccaatcaagcatccaaaaaggaaaagaaagatacacaatacataccagattccgaacccgcagatcccccaacctcccccttcctcctattccgattattcctcacatcacgcgaccgaaaaacactatacaacaaccagccagcaacccagttcgggccgtattcgccattcgtcgccccgcgctcgaataggccgcgcacgagcggcggcgcattgtgacagatctcgaggattgcccagcgctggcagtccgggcggatgtggtgccagaaaaaggggggacgggttgctgggtcggcgcgcacgttgtcaaggaggttggaggtgtcgaggttcatgcggttgtagacaatgattgcttcgtcctagataatattcgttagggggtacttgaaatgtatggtgtgtgtgggtgatatatgaccattggagagggaggagggaagaagtgctgaaggtccggctggtatacttactcgcatggcacggtagtattgctcatggtgcggatcttgcgggtttagacccaatgcgagcatgaattcttctttcgatactcgaggtccgacgggcattgtgattggattcctcggttgggtattgaatggggtgttggtatatagtagagccgagcttgatcgagatccaagaaagaaatcaaagatcaatgtgaatatgaactggagaagccaactcacagcccgcgccaaagccagactttatatatctgtccgcttccaattctaaaacagatcctaacggcgcggaaacccatctaacggccgttgactgcaaattgcacggcgccgaggccgccgtgccgatacaatcagagacgcctatgccggaatgaagcagagcgaacggacagcacgagacaagaaacagaaacagacgcaatcagaccaagcggggaaatgaggcaaagggcaaacccgcaatcagatcgatataacacaagcacaaggatccggagcagaggacagggatctatgggatatacttcgaggctaagccacctcttacctcgcaacaaataaagatgattattgtttcttttggcgtgcatgcatgaccgacaaagggaagcgtaaagatggagggtacgagtccagtgttgcagttgaggtattttcatttggctattctggggctttctggtctgtctcagcgcttacgattctctctccgggattagaccctagtgtacttcttgcatgatttgtggagtcgggtggtacatgtacaatgtacgtgtagatgatcactgcacagccgttgatatacaaccccgggctacgtcaaactgtgacccgggctgcagtgttcgcttttagtggtttagcgtgtgcagggtaagtaaaccgttgggggctggtggaatctagaagatatggtacggcgctgtgatacagtctttctccgggggaagtaggctgggggcatgaagttccgatgtggcaaacgagagcgtgcgtattttacagaagcgcgaaaaagaggaaagcaaaagagaaaaaggaggtagtatagattctcctattcctgttctctatctctcgctcgccccctcgaaaaggactcatctcaggccagggtgacgagtcgaataaagcgagacaatcgcaaacagagtcatcgtggacccagaacttggggtcgaggactgagcgcgaagatagcaggctaagtgcgttctggtatatcgagggcgacttgctgagctcaagtctgctatccgagacagacgggtagaaaatatatgtatgcttgcatgcatgagaaaggggtgtgttttcgaggtcagcttttacgttgtatattacccggagtacacagtcgcggatctagatcgagatctccgtccgacaagaggtacaacataggtatccggtagggaaagaaacttagtatccctgtattctaatatccctgccacgaacctgtacgcatccgccaagaagaaaatcgacacggctctagcttaacggaaccaagtctagaaagccacattccccactgaggtgtggagaaccgttcatcccaagctcgacatcgaggtccactggaacccaacccagcaacaagcgaaacattcaagccatccttgctagcggggaatagagccaaataaggcacctgtgcctacccgacggcttgcaggcatgctgcagaaaagaaactcgttggctatgtcgtgtaaccttccaggccggacactaggccaggatgcaattgagctgagatttgaccgaccggaacccaaatcggtgccgttgcttgcatctgtgtcagctttttgacttcaatggtgagcgcgtacttgcttcccgttgcggggaagggggatccgggtggaagagcttgactcgatttcaattttctcgtttgtgatgggtgcatatgcaatgggaggatagtcagttgaatgggacgagcaacgtggcaacaagtatggccgattgatggtcgaattttgaatgatcgtgtgcccttataacataatagggttgaaaatacccttgcggctgctatacgtgaaaggctattttagtaactaccaaatggtttgggcaaatagatatatcataaaaaggaaaacgacacgtaattcttgacaggagctcttaccgtcctatctccgggtcgattgaacttgtccccgttggcgctgcgattaaagaacggatgtcacattgtggacaagacaagggccagccaaggcggatcatttgcgcaccacgatttgaatgacactgcataatcccgctgctgcatttcatactagaatggattgttgagacagcaaggccaacaatatatgaggagtgtctgtatctgacgcactgaatcggaactcaagataggaagaggattctttaggggcacttcatagaactcaatggttatagctagccaaataggctagatctcagcctatgcaatatgtgagcgtgtcattgtcgctggcgtcgcaccatctccatactgcagattcccggtactcgttcatcattcactattgggcacacaaggccggatgcaagcgtaaatattgcaggacttgctgtcagttagagtagacagtggagggatatgttgttttgagcgcactaaactcgtaaagtgcagcattcaggaattagggctcgtaaagcacgcacacacagagatctagacgtaccctccaatgcaatgacagatctagctgatcaacacaaccgaccaaccaagcggcgatcaaataactatatatccagggttagatcgaccgtcccacataggcatagtataaagttccaaagttgagtcaagcttccaaggttccctagagcattcttggaagtggctgacggtcaaaaagcttttcggggcgccacttctcggctcggatgcttgaaagttatctaataatcagggcaagtgtcgggcagtacttaagcttactcaaacccaatattcgggtactcttgttgattactttagctacattctaaagtctagacatgttacaggctacttcttgcgttacatgtacccaatgcctactatacgatgacccacgaaacaaaaagcgcaggttaaaagcaagaaaacagggcctgatagaggcactcgggtttccgtatgtcgctattgttcaagacccctcggaatcgtcacgattctcgcgcctgcacctacgtgacagatcaggaacatccgtttgcacaccagcgtccggacgggaaagggagatatggtgggggatattgttatgtacgtgtcaagaaagccagagaagccaggatgggagagaagagaaagggagtgaaaaagggcaaagggggaaatgaaaatgaaaaagccagttgccatgctccatccgtcgctaaaaagaaaaaggggagggaaggatatcaaccagtccgcatgacagcttatttaagaagaggcttccttggtgggctcctcagtcttcttggtctcagtggctttggcctcctccttaggctcttcctcgggctcttctgccaccttcttcttctcctccttgacctcctcctcttccggcttctcttcttcgtcctttacctcctcgccgtagtatcggcggaggagtttctcgacctttcgatattcgaccttgacttcatccagagtatttttgatggccttgaggcaaacctccgtgtccggctcgtcaatgagacctgtctcgtccttgtgggcgccgaagttttggatcttctcgcagccgtccttcaccttgacaaggcccagtgtggcagatgagcccttaaggaagtgcccgagggcagagagttcatcgaggttcttgtcatctctgatgctggatgattagtaaaaggacaatctccaaaatttcactagctaggacatcactcacatttccttctgaattttcttgtaggtgttctcagcctggtcaaagaaaccgtacacaatgctcttgctgaagtcgcgatcctcctcgtcatcgtccatctcaaggatctgttcgaatgtgctctcgtcgagtatctccttataatcggagagcttgggagggccctgcttggcctagactcggatatcaggccgaggaacctttgaccacggggtaggaagtacttacctgctcggcctttttggtatcggctggtgccatggttgtgtatgtgtgtgtggaggggatgctttaaggagtaggtgagagcaacctcgtgtaatgcggtggtccggtggataataatgaggttgatgtatccggtctgatgtctagccaatccagatggaatactaggggctctatttgcaaatcccagtcagctcagattccaagtgatccaggtcttggatggatagaacgatgtggcaaatcgatgaacgtgaggtctcgaatgtaaagatcaatgatgatacaacaaggacgtcagaaccgtaagatctgcgcacaacgcatatgtcgtcttacaaagccagtagatgttacggattcaggaaccaatgtggtaagcgagctgttaatggggacaatggtgagcggctccggggtctatggccaaagagaagaggctggaaccgaagcgaaatacagccaccagattgagtgggtagtgagaggtgggaaaaaccaagacaacgggagttgagggggatagaggggtaatgcgataccacaacaagcaggggctggaggggggaaagaattaaaagaaccaggtgtggatgtggtatattggtagagggaataaccagggccattcagcgcatatactcgaacggtggtccagtcacagcctggtaagccagcactagcgcatcgcaagtgctgcagccccaaagccagtgtctccactagggaattgacagggaaaaaagaagatattcaaagagagaggggcaaagaaggaagtgcatcctacctatgatatttttttctcgcttctggagatgatcaagtgccgaaagtgcgacaatgggacacaataaaccgcagaaagaaaaggaaaaaggtcgaaaaggaattaaagacgcagagaaacagaaaggaggatgttgaagcaggcgagggggagggggaagagaggaaatcggaggggcggagagacagaaggtgggagaggaaggaggtgggtaggtcaactccaatccgaagggcccaattcaaggatattgggaatttagtgatttagagaggggaaatatatcagagaaaatcggcaaaaattactcaaaaataaataaattgtcagctactcatttcaaattcactagaatattgtatcgcgaatatatagataagtaatattggtattattttacattcctcgcatcgtcttggcgtggaacaaccccaaacccacgattgcactagaactagtatgttgtattattagttacggggtgctagctatacaatagtttctataaatgcgattttattcttcttctgtagctgtagccgaagtcatccaaaaaaaaaaaaaaaacaattctagacgtccgacatagactagtacattcttctactccgtatggagcagactttattgcttcttgcggctagacagcacattatcatcttagattttcagccacgatctctcgaggaactgttatctctggatcaaatttctccgagcttggttcgtgagcccagtggagtacaaccgtggcatcagctcttgaattgatgggtccactacggagtggaaagaaaatgctcggaatgaacgggacagcccctcgatgacctgctggaagtaggtttagtggagactgatagggtaaaaaaacacaccaaaaacacgacgcgttttctgaccgcaaaagacagctcctatatatctggcagcagtggccataggacgacatcatcgggccgccgatcccagcagggaacgtcatttgctctttccccatgcgaagtatggatggccacacgcggaaccatttagggaactgcaaatagccatagccttttcctttttgtccttggggttctttggaagaatatcggcagaacttttcatggctcggttagtacagcttgaaaagaaaaacaagaataaacttctagtgtctgagtctgagtagacttttagccgcgaagaaaaaaaaaaaaaaaatagggtaagacgtaataattcaggctcgtacagcagggaagcacgatcgacttgggcccaagtgtgcagatagaacttgatccagttggtctggaccctcgaggaccgtgtctaataactcggaacgcgctcgtttggattgtatgttgcatggatttctcatctgacgtactcggtgatagtgagctgaacgaccaatgtgtgagctcacggctccacggctcctttttccctctcagcggggaagaaaggggggtaatattgttgggctaagtcagatgcgaaggattatgctgtcaccgatgacgatgggagttttggtgttttcttccattcctcttttttggtctggcttcacggttcgaatgtcatatgaaaagactggaaaataggttagtgatatgtcaattgaaattggacatgtccacactcgcgaaccgcagccatctttgcttatatagaagaatgggggcatttgcgcatctcctttcccctggattttgcgcgaagtggttggctctccatcataacccaccaatgagaagatgcgacagtagccatgacatcataggatggggccgtagttcagcttcccagccgctgatgtcattttagcgtaacggcaaattacggcaatgacgtcagtcacctcataattacatcgaattactcacttacatacaacggactgtttactcatttactctctacttgtgtaccctaataattccattgtggtctgtcatgcacaaattctaaaggattatatactcataatccctcaacgcctgacagacctcaaaaggcttaagatttacaacatatgcaggataacatcatggcttcgcctacgatgtcagcccgcatacgcctatgaccaatgcatggtagaagtacggagtacggagtaatgagaaatgccaatttcgtcgatatgtgaatcagtttttggtagataatatcggagacaagtggactatgaattcaatgtacttctctctctcaggaactatcaaattagccgatctcatctcaaatcccagctttcaaatcaaacaccaatccctccaatatcccaccaaaaacaagtcgagtccaaaataggccagagtccagactatgcatgtttgctgcatacaagatagcgtcctattgcagtagtccggatcagctagtctctgtaaccctggcagccaagagcgcctctatgggaagccatccacttagctgccgacacatgcactcgattgtgagcgaatcacataaaaactattcttcggcagagagcttctgaagttgtttgcatagctatcatattcagggtgagaagaagagagactgcatggctgacttctcaaaagggcgattgcctagtagcatgtagcacccgactgaatatcagaattctagtgatactggtcttttttaatcgatattgcataaccatcccaataaaactcaacagacaacaaaataaagatgcgctataccccagatctcaaacgccttttctccacagcttcgtcgaggtcttccagaatgcttacgtaaggaaccgtgacctcggtccctttattttgttgatcgcgagcttcccaaccaaatcaacatttccagttcctccattctgggtaacatcatcaccaattgccctgcccccacgaccccaacgagaagcaattccggtcaaaaatggcatcagtcaaaacttcaagcgccccgcgctccggctcttcgggtctaacaaaagcctacctcttcacctacaacaccgtcaacctcctcgcctggggtagctgtgtcgtctacacggcatccctcctcccagccaatgtctcggccaaaactctcccgaaggtcttcggtcagactttctccccactactgctggccacccagtccctcgccctgttggaagtgctgcacagcgtggtaggcctcgtgcgcgcgccgttcatgacgactgccatgcaggtttctagtcggctgctactggtttggggaattatggcacagttcggtggggatatcgttggtgctgggcggaccacccagctgggtgattatgcgtatctcgggtgtgtctttgcttggggcatcacggaggttatccgttatgggttctttgctattaccttgtctgggaactcggtcccaagctggtggacttggttgcggtaagtcttcttttttcttctgtcgtgttccatgggctaatgagtttcgcatttgactaggtacaacactttttacatcttctaccccattggtatctcaagcgagtgcgcgcttatattccaggcccttggacctgctggcaagctcagcccgcttttccgttatcttttgattgcgattctcgtgatctacgtgcctggtatgttcttcttacagggtccatagtattggttactgactacctaccaggatcttatgttctgtacacgcacatgattgcccaaagacgcaagatcatgcgcggcaagaagagagccgattagacagctcacccgcagcacataaatatgcttaaattgggtgggaaacgaaaagatgaattggatttatagctagcctgatgctcaaaagaaatgcaagggtctgtcgtatttaggacccatttagggtccggaggcctctaacagtgcggacatggttcttacctctggttcaatattgcaggagtcaacttgatctaagggtatagacatcatccttattgactaaaaattatcaatatgcctttttggctcaaggcttttccgcgttcctaaactgctaaaattgaaattgttacctagacgatgcgggcagagcggttggaaaacatgccttgtctaacttcttcagaactccgtcaacgtcaacgggcccgggatgtctatttgtgagctcaaagagatagccagatgctggtcttctcgggagtagcgagaaatggcattatcaaagtccccacggctgtaaaagcgctatatcaggagaggtttgaatgatggatagcgtaatggaaatgcgtcgctaggcaccgaggagggtaatgggcttcctaatgcgggtgctatgtatattgcctcctctagtaggcctgctgtaggagaaaaagagagcagtatatgggtcacaacgacgaccactctaagacttgataaggctagatcaggagatatcgcccgcacacgctatttgcgcttcgtgaatgatgattacatcagcatctacgagcgtgtgaggattgacacactagtggacctcgcctctgcttcaaacaaggatatcggcgtaatgtcttggtcgattgtagattgatcccccaaggtactccagattcaatctgctcatgaatcatgagtaacagggtccaaatcccacaagcggtagaagggcgagactccagcttactagacaaaggtaaatgtttttcagtatttagccacggctttcctacactttaagctttgggcctttgctcagatgatcttggaacaatgacgtcattatgggtctgatctgaagtcaatccccggatttccaactttccaacgttgcactctggattcaatgatggcttcacatcttaatgctaactctatttagacatggtcttcaattaattggagtgattattgttagtcaagtaaattttcaattacagagataatggggatatgaagacaagcaagagcaagcttgtattcacattgcgcgcaagactaaagatattgataatggtagtaaagtattcattggcataaaggtcatctgaaactattgtacaggtagagagttgtctttctaccacctgggtgctagcaaaaaaaggtatctcattatcccacagcagtccaattgcatgagcacccgtttagtgcttagcggcctctgtatatcattagtattgattccatgtcacaaccttgttttgttttcagtcttacccttgtggacatcagccttagtgttgtgcgacgcctcgtccttcttgtcgacaacggcatcctttgcggcggtggctcggctgcctaagctggcatcagagtccttggcgacatgcttgttggtctccttcgatgcctcagcaccaccgccctggacggtctcagcaacgtagttaacggcgttctgatatcagatattagcatttgaagacatgttatccaaagacagggtgaggcgaaccttggcggtctccataatgttgatattgaggttgtttgattgagtttggatgtttcaagtatttgttggtttgaagacttatgaaattgtatgatagaagaaggagatggtagaagcagaagaggcttcttatagtaaatggcaggtcggttggtagcagggctcaggttctgacgtcattgaacaagcaaccttggaagaaccgagcaacgagtaaccagctttgtgatgtaatgaaagggaggattacttgttcttacatgtacgatgatggaaaaaactctccacttaccaagctgttctatattgtacaataacagggtaattcgggtcggggtacattgtaggctgctttcttgaggttgtgggggaaatgacgcattaaaaacatgaactttgctattttgccatcaaaagcaagttctctacaatgtgacaagtatcacgttcactatgttgtaattagtcaatccccatgtttgatgacctcggctacatacagcagtataacggacatagcgagggtgtttctaccattaactagagtatatgatactatagtcaaaggttacagatcttacgccgttaaggtgagcaatcgtataaaataagacatattaaattgagaagactattggaagatacgtcagaagaccgcataaagccgtctattcctgttgctcatatgtagagataatgaacgtatgcgtatgttgtagcattgcttgcgcggtaagatataaacaaattttctcgacacgagcagtccttgctaggctctcccaatgagaagaaggtgcctcgcaccgactgatattaattgcttatctttgggctttgccaacattcggtagctctcaggtacatgaagatgaacagcggtatagccgtagaaacctatgtgtactattccagttggtgacgtctgaaactaactcaacccaagagcgacgagataacgaaacagcaatgtgaaatgccgatgtaaggatgttgatttcaaaataagaatgaaaaagttcagggtgagtcggccgtttatgctgcatctatccttgacaaggtcgaactagcaatctgaataattagcacgtttgagtaagatttcaatgtatatttcgatgtctttctttttctacctattatagccaggatgttaaatctcacttttatattagcatatatttgtggaatcaagaagggacctgcctgttacattgcttatttggatgttttgcttgctcatgagtctctcaaatctctctttgtcccattcgtggccttcgttgctttgcccctacaagtttacacagatgtgatgtgagaagggtaaggaatagttagatagtacagtgaaggtttccagatcaggatgacttagcggctataactagttatgacataaaagtactcccaaggcataactagatagcaacgcagacacctttccacttccattctcagtagtcaccccatgctgctccctctctagcaccctaccactcccaatgacgactctgctctcacacctgttttgcaggcagggctgtcggtgcctctatcctagggacccctcttcaatagatagaatggagatgaattgttgaagaagctagaagccataagactatggaaaaatctagcaaagtgacatacagtaggcgaaggccaataaattcaataaacacaaagcaattctgaaaggaaaaaagtagatagcgtgtttgcgcgatttcttgagccccctctatcagctaaaactcgatgccttatctgcaggaattcaaaacatggcatctatcgtaaaaatatattgtaggaatacttcatgatataggcagtcccctgtgtagcagaatgtattcctttcagacaccaaaggctttgtaaaactgataggctactatccggtgccatatctccaggacccggtgcagtaacgtatgcaaaggggctctgtttatataactggttagttgaaggtgaaatcataatgtaaaagcacaccgtgaagggtctattacactttgtcacagcagcttatctgctataagtttgccccggatcttctgggcactccatgatccatccatgggaacaagggctttcgccacagactttcccgtctccctcttcaacgacgtgatggtagttcctttattgatttggacatgaaggttgtagtattgggggcggccacttgtcagctaggaaaagtagaatgttagcgaatttcaaaatagtgaaatccatgccactcagtgtactgcgttaagataggaagaaagagagctcggtagacagaccccttgcatgtccagcctaaagttcacgtccttgaacaactcatgttctccgtgggtgaagcccaacatcttggaatctgggatgctgttgatgaagtccacaagttcttgggcggtcttttttctccccattgtaaacgtttataataatgaactaggctcggttgggcagtaagaaataagtgatgactttgagaaccgtcttgcgtgaatgatttcttgattgagatggtttgaaagacgtgtcccttctagattcttatagtactttgaaatacacaaataccctaggctctttacctcttcatggggccggcggtaactgaacccctgactacatttctaaactcactgtagtaggtccagaacttgcggagtagacccaggcggttagatttgagagttatcattatgccacgaattgaacatgattttcaaaaagaggctgaaacaagcataggtaccatgcgtaataatagtttaaatatacaatatagatctttttcatctttggcaagatcatccctgggctaaaattacgtgctaatgtggagcattacctgcattagcatacgcgcctgccccaaatattggaaaccgactattggaaaccaattagctcaatgactgcaacaatgtgatgtgatggagatgcaggttattgttattcaggattcaatctattcgcaaaaggcccgcgagatgttctaggtggacattattttagaaatttgaaacaccccctacaggaatcttagagtggcgccatctgaagcgcctatgcacatctattaagtggaaggcaaaatggactagtgtgatagcgaactaatttactttcatggttggaaagttcttttttaggcagtctaaagcagttacttgacctcactctttttagaaatacagctttcagaagcatgtgacagccagtcccctcccatgcataataatagcaatagtaccaacctacacaaactcaatggccgtggcagtctcgcccatatttacccttatcagtatatggagcatatattgagaactggacttggcgaattgcaattggctaaatggaactatcttgcctgggaatattttttagttgcattgcagaggaaaccagatcaaatacatgaatgaatcaatgagaaatacaactcgaactagaaggtccgataggtatcatttctctctagaagcacataaaaaaaaaaggcccagcgacttatgaggatattctcgggtatagaaaccactaagataatacgattatggtcatttggatcatgaggtcaagggcgaaagctttgcggacacgatagcttcatttcggctatatctaaaggaactaacatttcctcagcccagcaaaccggtctaatctttttgtcaataaataattctggtggtatgtaaatcacaagaacacttgaaggtctttgtcctaaattggccagatagggagcctcatggtgactttaccaacctaggaacggattctaggttagtggtcattggcatctttaagtatttgattcaaggtattcagaagacatggattgtttttgatcatggatattggcaggcacagatgttattgagagtgggaagccatcacactgcaaaaagccgacattgttgcactgacgctatgaccagatcctatcgcccaagctgcgcgcattgttcatatcagtggtgatgtctccgatccatgcttcgatatcacgggcggagatccaactgtcacaataagccgccgcatagtcaaagtctcttttaacctggctcttatcaaaaacttccacccatcccgggtctagttttctcatctcatctatgaatatatcgcgtaatagagtggcctcatactgccataggtgctcaaagtacacctcactgggttctcccgtatcttcgggtgcatattcctcggttttaggctctaagcgtcgtggtcgctcctctaaaaatgaaggataggagcaggctttccataaaggcaccgctgaaacgcactcccagtctaggacgccggtcatcttcccgttgtcgtcgacgaggatattatgtcgtgagaggtcggtatggaatatcattgacggttctgaatcatcatcatcatcggtggggaagaccagcggaagaagggatttgaggttatcgattattttcagtgtcctcttagcaacatccacttcgtcttcagcgtcgctatcaaggtctccggctgagtgcttattcaaagccgaatgacagtcattttcattgaatgaaaggcgagctgtgatccagtccttacttgagcggaatgggcctcgggggatatcttggtggatatgtgaatcccagaaaaatagcatagaaacaatccggcctacatcaggcaaagcccctgctggagaaccgttgtctggcggattgaatagaagagctcccgagttttttgtcgtaggcgagctaccagcatttggggcggatccctttgccggaactgatattttggtatttatcagctctctagggggcagaatttgctcgctcggtgttgaattatcaacgacagatgtctccccatagatatttccgattccgcgtagttgatttcgaaaaaggcaagcggagcttgccgcaagctccctgatcaggcatgctttcacagcaaaggaaagagatttccagatttcaccgaagggttttccaggcattttggtcatgagcatccattcaaatccaatggggttgtctcgggatggttggtaggcgataattctagggattgggagacttgtgacatggcgcacccaatccattgttgccacttcgctcgttaatttgtaacgtggatcgacgggcaatgagactcgcacgataaatggttcattatctatgctgacgttgtagatcttgttgaatgcaccctgggcgaggaaagtcacttcaacggcgcttgatggccgaagggcctgtactgtctgctttatagccccaggttcgggttcaacagtccatcggggctcaaaaccaaatgtctcttccacccactcgaggccgcggaacggtgattcctgtgattctagcgactgcattttcgggagggggactgtagacgatgaaaccccacttttgccgccgtgttgcaatattttatctaaccgggatggagaaagtatcttcctttttgaaatactgtgagtatcgtggctgtgcatgagctgggggggtggacggtagccccatctcgggaaccttggaagctccagcctccaggttgccccgtggggcttggtattacgcacgtgactcgcatgtcattacctatcttgcaaaccggactttgtctgccaggagctttcctatcttagctgtcactcagggcaatccaggcgttgtcttagcgatctgtagagtattaatagcagctaagcttaggtatctaactatttaactaaacactgaggtctacaatgtacgccagttgttcacaaattggcgagtcctataagtcctatagagtataaattcaagaggtatcaaatcaaacaacctcatagcataattcatcgctaaacactcttaaaaaaatgaatccaccatctagataaagcacatcattagtccgaacataccacctccatagcgaacaataaccacaatcagagtcattcaaaatcccgcgacttttccctctaataaatccacaatcataccaaaaaaggcgtagtcataagcatccatatcataaatcgtaaccttcttccgccgaaaccctcactcaaacctttcccccaaacccgcccctaccatcctcctcaatcccaactctaacgggactacttcccccactccaactcccgccctgcgagctgtcactcctactcccactcacagaccctaaagaaagcacatcatcctcacgagcaatcttccgtcctgcaccaatggcaacacgcagcccctgcatggctccgccatgttcatggcccgccgggtacatgccgtcgttgacggaaaagttgcggcagatgaggtaggcacgcatagcggcactctcccgggccagcgtctcattgctgcagatactgtctgttcgatactcacgattgttgacgcgtacagtgcatgtgtatccgctgttgcttatataggcattgtagattggttcgggccagttgcggcgacgacagaggcctgcggtttggatttggttagtttggttttgggtgggtgggattggttgggctgtgttggatagtgcttcggtgtttgcttctctgcattgggtatatatttggaggcaggatatccagggttggatattggcttgtgtttgcaatgatgtatgacatacatagctcggggagggtgatagtggggagagtgacgacatactggtcaggtagaggatatagtacatcttgcaatttggactggatgcaagccgaaagcgagaaagacgggagacctggagatggcgacgggcaacggcgttgccacttgtccaactgcaacgaattgtgacggttactcggaacgcattggacggatctggcttgcagcgatacgggtttagggctgaggctggcttccagctggtttgcggtcagagaatatgcggattgtgatgcccaacgggtagggggaccgcgtttgctttgctagcagcggggaggatgtgctggcgttccaaaaaaaagcacgattttaagactagtaaaggccaagggtgtctaattcgaagaagatagaaatgaaaagtgcgagagtgagagcgatagagggattgagaacaaaactttggaagaaagattggaaatattccacacccatatacaaatcctagaaccgagtcgccctccccacctcctccgtacaacagggaaaaaagaaaaacaaattaatgaggggaaaagagctgctgcttgccatatacatgattacttctggaaaacaggtggggcttttgcattgataccattcccaagtcataccgcgagctggccggtgtacacagtaccaatagagaagggagacggtcgaaattgcgacagcgcacaaagcaacaagaaaagggggacatttggtatcagtgcagatgacctgaagaagaaaaaggtattaaaccaaagtcaattctaatacccactgttgaaagattgaaggtaaaaaagtcaagtatacagtaaacaatgacagtaagcaaacaaaaaaagtaaacaatcaaaccttgagatagatcctgggacatggatctggaatccgagtatagactacctccactgagtaaacaaagtacaaaaagtacaagaagagaagagaagacaatagatgcacgcaaacctgactcgcatcgaacctcggaaaaggcccccaaaagaaagaggcattaactcaaacgggtattcgaggtattatcgtgtcgttttctcggcgggtttatgatgcgctggcatatctctttgccagtagaatcgaaccgagttatgaggcaccggaaggcaccgtgaactgcgtagtaatgcccctgcaattcgccgatcgaagcataaacattctcggggactaagggagaccttgcaacctgtttgcagaaggtaatacctgaagatcatggatcccagtattccggagtggtttgaatggaatagcggtgctatagtggtactatgctctgtacacgggttatttttttttcgttgccattgctttctcggaatgatcccctcgtttcattttcgccccacgcatcaaagtgcaattaaatttgccgcccttatggatgtcgagacgcgcaggtctgcgaatgctgattggcgccaaggaggggccgttcatgttgtgcagaacgcgcctgaagaggggtcaattgtttatgaaagggctgagtcaatcaaggttgaaaggatcaagtacgcccaatatcggagaatgggaaattgcatgcgctccgaggaagttcagttactcgacaggcatcggactgcagtgatgagctggcattgcagtggggaaaggcgttggatttatctgcatattctaggactgacggttactttttcccccttgggcctcgtgcagctttggtggcaaacagattatgatgtacgtcgtaggaccagtgagaacggcggaaaaggtggaatcttcatcgcgcaaaaggactttgtagactccggaaatcggtgaaacagtcagttcaaaaaatagaaggaattggtgctatgtgctatgaccatgttgtagagccatactcgagccccgaacccaaccccttgcgtctcggtctcattcacagcattatccttagcttgatcgaaaaataatcctcgtggctcccatgccatgaccgctgctatgaccgcggggcttgcagtctcaagactaatcatgcataccttactcgctcggagtccctggttaccaatgacatcctgcttcaatttactatgttctcgagagactttttcaaggaaacttcatccgtcgtggcgctttgtcatgtgtcttctttccggcatcggttcacgcccctcccggttagacagtgaggggttgggcctcggaccagagccgcatttgctccgcggctttgtgcgggatcacatacaaaaggtgcattggctttagccgatcaccctttgaaaacacattagctttatcgcggcttggtgaagacttccaggaaaatgacgatgtgaagttgcttgcgacactcgagtctgtccggtaatgatagttttgagtcgcgctcaatcccgccaaaacgtaacaggtgtggtatgaatcaacatgcctgggtcttggtcagctagatgcgcaaaaaaaagaactgtcacaaataggagtgaacatacttgcccggtttgtcccgaagaccaccgtcgctcccttgacaacatccaaggatgtatcgggttagaccttcgcggctgaaaaggctggtggccggtggctcagtgttatccggcttcccttccagcgaagattcaagcaatggccagcatccaccaacccaatgactgtagcatccatccactagcttatttgttcgtccggagagaccaccttccggggcggactggcgggcagacaaccacgacactagcataggaatgtccatgtgtctgcaggaaccattagcatataaagtttaaatagagtattccgggctagcgtcgcacctgtggaagatctcttcgggaggtcccaagatagatagacatgccagagcacaaaaggcgtatgctccgtgggcctctgccccagggctgccggagatacccccttcaaatgtttgacctaagcgcgagcgtcagcacatctcaaaccttgaagacagaactaccagtaatcatacatcgtgagagatattcaggaagaccactcgtcaaactctctaagcccgcctcccgcgcttgagagcccggagcaagcgtcaagggcaagtcaagtagcgagataagagtcatagcgcagtatgcgccactgcattaatgacatgtcagatcttgcattgaaggaggggattgacgagcggcttcggcccaggaattccacgtaccgtacatcttcctccccgccctcacaaacacggaatcccccatcaggctgcttcaatcggccgatccattgccacctggaaaagacagaaaccgggttagacgcaggatcacaccagacgtacatgcagaaggctgccagtgacaactcacatcgcgtgccgatccaccaatccaaaggcctcctcgcctccaaccatagccagcgatagaacagcggcataactgcccgctatatgggatgtctggccgtggccgccgccaaacccacctgtggggttctgcatcggccgaagcgtagtaatcacactaaagtagaagtttagaatggcatcttcccatattccacgttgtacaaaggagacgatcttttccgaaatcagggtatatcccctccaggggctctgtctccattctgtggatatgatatgacagataggaaaaaaagcaaattgggggagaacgaggcggggaaagggaaaataaagaaaataaatcccaaaagagtaagatgtaaagcatgcacgcaccgttcacgaaatcgagtcgtatcttcgcccagcatagcaagccccgccaacgcccagtagacaatccacgggcggctggcgtccatggcgacgaacccttcgggataatcctcgagggcatcgtagaggaagctggcgtggatatcccgttgcagggcaggtacgccatggtcgttgaagtccttctgagtgctgtggatgcctttcaagaatggcaggcatttttccagcgtcgcgttctgcagatcgatggtctccgtgatgagcgggtcgcggatgggtggcggttgcgtgaacaaggccgggatccccgggcgcggatggttggagtctggattcatggctgtagtcatggttgtcctggctgttggaattaataaagttgaagttgggcggttcttagtgttggatttgtgtgcgttcggaaatcgaacttttcgaggtctcccgatgagcggcattaaatgggatctgaggtattttggagatttgacgctcaaagaattgtaacctggactttcttgctattgttctgtagattgaatgtgaatgtagaaaagcctagaatgattctttgtttccccactcgatctctaccggaattcctatctttgacgacatcgtcacaacgtgtctggttttacttttgagtacggagtatttcttttcgagacctattaactagagataggcattctcgtggacagggaatacatagtgctatttgtgctatttgtgctagctcctgcatgtcacagaaaatagttactatatatgtgtgatggatccgacgccatgcacgccggtgcgcaagtagatggatgtgcttacatgacacccttgctgcatgtgccccccaggatctgaatttcaataaactggacgtgtccagtttcttgttttgtcaggattcacgatgctaacttggcatctcaacaggattcggactatgtccgtgcaataatatcttagccctatttttacgatttcggatttattatttcttttcggaaacaccctagtgtatggccagcagctgaaatccactaactacctttgaggcatgcatactccgtagagggaaccgaatcacgggcatgagagtgggcagacagggagctgattggatctgattaggaaggactcaacggactaatttggggataacacgatccgactgtcagatctcaccaaattcttattgccacgcaggtagtttttcccctccccactgatctcccgggtccggttttatgggatgattttctattataggatctcagttatggcctaggaatatggaatatatgtggaatatttatggaatcgtcataatagaggtatgctatacttatgatatatgagatacctatgatatctagaaattaatagtactccgcacataaaacgagaaaagaaaagaagcaaaacagaaaaaagaaaagaaaaaaggcaacttgcccgtttaggaaagaatccaaagaagaaaagaacatcatgggatcagcgaactccggattgccgtcccctccaccactctactccgtacagagacaagggcacgccgtaatctccctccccctccatctcctaatccttcctatcccaattcccgaggcaaaacacctcgacactactgcaaagctagtccgccgtggcattaattcatcgtccaatactggatcaacgttccctccacgccgtcagccagcctccactctccacaagcaactcccctagcgcatttcttcgctcaccgctgctttgtcccccccaccgcctcactttccctcttcttgatggttgtgtcacccttctgaagaaggccctctcatccaggctggtccttttcttccccttctatttcacctccccgtgatcgttttgactccaaaaaagtcatgtccaatgtcgatatatccaatgatggcctgattggcgtcgagtacgactccagaggctatcttcagcatcaatcatggcctataacgttagatcaagcgccccaacggtcagaagaggtccatggtctttccccattgcaaactggcggtcaccctctagaacagtcggtgacccaggacccaaatctcatggtggattggcactttcaaccgctacacacccctcatcaccaccatcacctctcatattcctccgaagacccctcctcggcgtcccagtattccactagttatggcatgcccatgcagtcttcccccgtcgatctcatgtcggcacagggccagatgagcgccggcttgctcgatggtccttatctgccgatgtctgcgccggtcgacatggtccccttctcgtatcaggacttccagacggatttgatgacgttccccaacggacttccggaagtttatgcccctcactccgttcttgaaagcagctcgcccaccgatacttatctggaggtccgttctctgtccagcagcgacaacggttggagtactatcgaccaccgtcgctctctcgattttggttttcccgaacaaggtgttttcgtcaaccctacccagacactgcacgatcgcagcctttcagagtcttcttactccacatcatacggcagctttgtggatatcacaaatccgatcggttctcccggttctgagaacaatatggatttgccttgctataatcaccatggccacgggcatagtcatagtcatagccatactcacagctacaaccacagccatagtcacagtcacagcagctccattggaatgcacggtaattccccgacaagcagcgcaatcgtcctccatagccagtcttcgccaggctctcgctcgccttctgcagtcagccccatcggcatggtgcgacccatcccggtcccactcaagaaatcgacctccccggcccgatcagctggatcttcgcaggtatctgcctcaccgccgagccgcaaaccgtcccgcaagagccccattgccgccaaaaccgccgagaccaaggttcgcaagcagtcccaaactggcaagcccgagaccgaaaagcgtgttggcaagagaaagggtcccctcaagcccgaccagcgccgacaggctagcgagatacggaagttgcgcgcgtgtctgcgctgcaagttcctcaagaagacgtgtgacaagggcgaaccttgcgcaggatgccaaccctcgcacgcccggttatggcaggtgccatgtactcgcattgatatcaaggaaattgggtatttcatgaaggactggaaggcagattacgaacgccacatcactatgggcttctctgtcggtaacattactggattctcggaccaagaacgcactctgttcatcacccacggttatggacagatcctgcccatcaatgctcgcgaggtctatgtccgggacgagcagtgcttcaccgttgactggatggagtcgatgcaccgggatccaacacaatatgaggtcgagactgccaaattatccgctggtatggagggcatctcgcacgcgatgctgtctgattaccttgaccgccacatcgacggcaatggcacatttgagaagttcgtcgatgattacttcgagggcactcctttcctgacgcaaatgctgaagaccgcctttcgcttctacttccgcactaagctgcccgttatccgaaaggcactcaagctggtggttgcttacaaccttaccatgcatgtcaccatggtcgaaggcattggtgaggaggaaggtttcctcggcaagatcgagagcatgggctccaagttctccggcaagaccatggcccccgtcatgatcaacttccagattaaatgtgccatggctagcatgtggcgtgagctgcagaaggatgtgctggaggagctgtcagcactctattcaagtgtgtacagcggcgacaagctgaagaactggccgacaatcttcatcttggcctccattctgctggccgtgtgggaggagatgcagttcgacagccactaccgcacaccagacgcggctgccgtcgacaagttctgcaccgacatggaaaccaccccggtgggcgtcatcgtcggactgttccaggccatctcacagaagctgcccccgttcaccgagtgggattcacaaaagcaccaccagctgttgtactccaacccagatgtttgcaacaccatgactgaagtccgccaacatgtcgagcaacatggtaagccacacactctccccgatcttcgacttcgatctccgaaactaaccccgtcttgcagaaacctaccttcgcagccgcactggcacgaaattcaaccgtggcgacttcgactgcctttcaaataaatttgtgtcgcgactggtcattcgcgccaactagacaacgaccccgatgcgcaaacgcattatgatgatgatatttaccacgactaccgtttccagcagcgagtactgttctgcgattgcgttttgaatgctcaatgttaacactgagaacatgcgaaccaatgttgtaacgatgcgagcgcacttccactctttaacgaagaatccgacgggcccccctcccagcgaggttctgccctttatttgttccgagcgaaccgactttcttttgatccagtcttttatgagccttgttttttttggttttgtcttttgtcatatttacctctttatttttccttgatcataagtcttttttttgaactttcttgtttgacttttttgctcttgtctttggtgtacacctttcttcgcatagctttgtctccagcgatgaacgaggatcacgaatgtcatgaccgtgtacggccgaattgtttctattgttttgttttcatttttgtggcacctggcacccgtcactgaacaggccaacaattcaagttaaaacagggccctgagcacggtgtacaggctgtcttatccccgaactatcacattctttgtggtggttgacgcatatcttcttgccggggaaaggggcgtcggaaggatatttgcggaagcgttctgtttatacattgcgggctttatgctctatatcttgatagtcttttaacttgaattctcatttttttccagattcttgttgatcgaactataaaaagacgaacaagacggtgaacccggatccggctctgatactaagtttggaagcgggtactgggtacccgggagacctcagcagttgccgtgtacagccccgtaccctgtactttctgatcactagcgtctccataataggtccaccccctcttttggcgataagcaattcaacgtcatcacttcgggatctggaggacaaaggggacttgagggatatgaggcgatataagagacctcaacagccttggaagattatagaattttaataatgttaagaatagtctatctgtaggtcatatccaatcaaatataggttggtttcgcaagtggcgtctatgctcaggcaccccgtttgactcatccggcatcttctggcattttcatgggcgtcacctgcgcctgactaagacacctcgccccctcatccttccaaggttccctacataaggacactgtttcccctcttcgaccttttcccttctttcaatctaccattacccacagctcgcttcacacctgagcaaccctctcttcaaatcaacgtcccaaataataagcccatcatgcagatcttcgtcaagactcgtacgttcacacccccttatcgagagataaccgcctggatcccactggccctctcgcactcaactcatggacatccttgctaacacccctttgtctatagtcactggcaagaccatcacccttgaggttgagtccagcgataccatcgacaatgtcaagtcaaagatccaggacaaggagggcattccccctgaccagcagcgtttgatctttgccggaaagcagctcgaggacggtcgcacactgtccgactataacatccagaaggagtccactctccatctggtccttcgcctccgtggcggtatgcaaatttgtatgtgttgactgccttcacgtcctcgtcgttttctctcgactaacatttgccacagtcgtcaagaccctgaccggaaagaccattacccttgaggttgagtctagcgataccatcgacaacgtgaagtcaaagatccaggacaaggagggcattccccctgaccagcagcgacttatctttgccggcaagcagctggaggacggtcgtaccctgtctgactataacatccagaaagagtccactctacacttggtcctccgtctccgtggtggtatgcagattttcgtcaagacactcaccggcaagactatcacacttgaagtcgagtcatccgatactatcgataatgtgaagtccaagattcaagataaggagggcattccccctgaccagcaacgtctcatctttgccggaaagcagcttgaggatggtcgcacactttccgattacaacatccagaaggaatccacactccaccttgtcctccgtctacgtggtggtatgcaaatctttgtcaagactttgaccggaaagactatcacactagaggtggagagctcagacaccatcgacaacgtcaagagcaagattcaggacaaggagggtattcctcctgaccagcagcgtcttatcttcgctggtaagcagctggaggatggccgtactctttcggactacaacatccagaaggagagcactctgcacctggtgttgcgtctgcgtggtggccagtaattgacttacgattctttttcccaacttcgataggttttacatgacctgcatggcgtttagtcggtttttcgaggctgaggcttcttttcttgcaatgtgtttcctgaggacggcttctctcttttactctgcccaccttatcatcattgatatatgatagatagttctcgtcaattcactctagcaatatttgctagtctttatgccatttcattgtattgcacttgtagggtaatactaattcttgactggaattgaaatggtacataaaatgttaccgaaatagatatccttccagcatattattacacctatcttcataggcaattctattcaaccacaccatttctcgccaccttgcgttctagccagagcacgcttcagactctcaatcccttttttgcctctttgccactcgcgtgccaggaaccacttgtggcgtatggcgcagaagcgggcgacagtaaaatattaagtaatcatgcattctttatcgtgataacgacttcctctttcaacgagttccaaccacaatcgcaagctccagaggatgcgagctatcgtccgggatgcccgcttacttttatcaccttagcttgcaactcctctctcacagcccgtctgacgcgccaagctctcagggttcctcctctctcgcgctacaatccgcatgggaagctctccaacctttccaaaaacggagccggtcttcaacctccaaccgcctatcacccgcgggagataatcaaaccctattatcattagaacacactttggcgcatcgccagatatccaccctctccacccgcacaactatcccaccccgcccttcctccgccagcacttcttgcgactccaacaacccctccactagctcctcaaccagcacccaatctcttgaagacgacaagcgcttcggtgccgtctcgatcgagtgcattgacatggtcactccaaagcacccgccgaaacgcacttcgaagcgtggctccgtatctaccacagaaccagagaacctcgtcgcagcaggcatcggcacggatatcctaggcggcctccgtacgaaaggccgatatataccactcgactacgaccttgccgacagcgtctggggaattgtacatctgtaccgcgatttgcaggagacgccttacctcggaaacgatgacgagtaccccgcctatctgaagggctcctcagctgcggcccgccaacccggagagcagcaggcaacgttgaggcagggtctgaccggtacggcgggtggtcaacattctggagcggcgggtcttgcagaatatccttttcctgaaacaagttcctccactacacagagtcctgacgaggattgtacgacactatgtattctcgctgtgccatcttatctgtcgccgccggactttttgggctttatgggacagaagaccatggatgatgttagtcatttccggatgattaggactgcgcgtgcgaatcgatatatggtcttgatgaagtttcggagtgggcggaaggcgaaggaatggcagaaggaatggaatgggcatgtgttcaatagcattgagcctgagacctgtcatgtggtgtttgtgaagacggtcgaaatccaagtcgtggatgccggaacaccatctactgagcacggcgctctctctaacatcccgaccccttctcgagcacctgtatcatctaccggacaagcaactctcaccggcaagcctctcgcgccacccacccctgcactaatcgaactaccaacctgccccgtctgcctagagcgaatggacgaaactacggggcttctcacaataaactgccaacacgtcttccactgcacctgtctccagaaatggaaaggcagcggctgtcccgtatgccgatacacacaagatgactaccgcaaaagcaatgcatccctgaaaccagacgaagaaccccaacaatgcagcatctgtcactcagaagaaaatctctgggcctgtctcatctgcggcacgatcggttgcggccgctacgacaacgcacacgccttctcccactggaaagaaacagcccacgccttctccatggacctcacctcccagcgcgtatgggactatgtaggcgacgcatatgtccatcgcatcatccaaaacaaaacagacggcaagcttctcgagctacccgctgcagactacagcgccctagacccaccggactggggcgatgccgtcccccgcgagaaactagaaaacatgagtatcgaatacacacaccttctcaccagccagcttgaaagccagcgcgcgtacttcgaagaaatcgtcgagcgcgccgtcgacaaggcatcgcaggctagtgctgccgccgccgtggcggaagtcaatgcttctaacgcctcgtcgcgtctggaagaattacaagacaagtatgatgtcatgacgattgagacgctgccgtcgcttgaacacgaccgcgcacgcgccgagaaaagagcagaaaaattcgaggccctggctcgctcgtttgagaaaggattccaagaggagaaggccatgaataggaacatgttgttaaaattggagggtcttgctaaagaggttgatgggcttaaggctgcaaacgcggatcttgcggagcagaatcgcgatttgacgttctttatcagcggcacgcagaggttgcaaggccagggtgaggaagttgagcaagggactgtttctgtgcctgagccgtcggctgcttcgaaaaagaagaggaaggggaaggggaagaagtagtttgggcgttggagaagttttgcatttgcttttgctgttttaataggtgtacggttgggtggtgttacttttgctcgggattgggagtgaacggtgtccttgggtattctcttgctgtgtccctaatagggacatggttggttatatgcatttagcgaggtgtactgagtatgctatagaaacgagtgaacgaatacgaatttatgaaatacattcgatctgcaatgagtacaacaatcaaataatatacaaacagctcataaaaatgcaagtatagatacataacctcccccaaaatcatctaaacccccttcctgacagcccagaaataattcccccaatcctcactaccaggcaccatcttccacccaatcccaggaacataaacagcacccacacacttccacctcatcccctccgcaatcgcacttccgcccttcgaaacacccgtatcagcagccctcatcaacccctcctgcaaccaccccttgacctcatccgggttaacaaacttactccactcatgcgtcccccgcggcacaacaccaatcggccacggcgcttcggcaataacctggttcaagatgaacgacggcagcgtccgcgagatagtagacccaatcagccagccgccgggcttgagcgcgcgcaggcagtttgtcaggaagctgagcggtgttgaggtcttcgggtcgatgtgttcgagcacttcgaagagggtcacaatgtcatattgtgggggggtgggtttgacttcggagctgggatttggtggagtcgaagcgggagttgaagtattagcgttgccggcgagtacatcctccagcgtcgtgttgaggtacttgaagcgacctgtgcgcaggtgcgaatcgacggtcggatccaggcgcgcgtgctcgcgcgccatttggattaggtccgttgaggggtcaattgcggtcattgaggcggctagggttggggttggggctggggcggtggggtcgagtgggattgtgcgtgcgagggactcggcgaagatgccgccgccgcagcctacgtcgaggtagttgagggttgcggtggagctggttgggtctggtgatggggttccttctgctaggcaggaggcgatgaattcgtggcggagggggttcattaggtgcaggattcgggaggggcccattgggtcccaccaggagctggcgagggaggagaagtgggagagttcatcggcggagacggaggatgttgagtgcgcgcgggttgggtgtgtttgagttgatggggcggatgcgggcgcggataggaagtggtttagtgagggccttgttgagcggatggttgagcggagggctcggactgagagagggagggtacggggtcggagggaagccattttgtaggtaatggtgttggttttgggcgaggttgaggttcaatggagaattggctccggtgctctactgagctttaattgatgcggagacccgaggattatctgtgggaattgttagctgaggactttagagggatatgagaaacaatagagagcataccactaagaatatcctgagcaattgagaagagtcttggagaaagcccatgaagctgatcaccaaattggagattcaatgccgaggcaaacatgccaagacaatttggctgctgtttgagcttcctttatggccatggatttgatagttctatgattcagtcatgcctccataaacaaccatctattaaataaactccacttggtatcacaaaacaaataattcgcatcacaaattcaatacaccatcatcccaagagacaatcttcaaaacctagctcctgcggcatatgcggaagagctgactcggcttggccatcgacatcatggatctcaatatcctcggcactagtagcgtaatcccagacattctggcctgaccatgaagccaactgatctggaacagcagcgccgagtataggaaggaaattccctgtggtgatgttgcagtcgagtccaagcacggttctgcaacgatccagcaatattgggaagagatacgaaggcgagccacgaatttgagaaagtgtgtgaagtataccccacagtaactcgttcgggtcaatagtcgactcagccagtctatggacggctttcggtccaagagatctcgtcacatcggcgacagaggatcctagatcaaagagcttttgttcctatatcatccaaatcagtatacaacaaaagactccatctcggattgacctaccatgccaatcccatgcgtatcaacagctccctgcgatgcagcaccaatcacgctcatcatagatttactcaccattactagtaggtgaaatagcaaaactgcgtcatcgtgtgagccaggctgtgtggcatggcttatagacagcttctacatcatcgtctgcagccactgttgcgtgatcaagatatcaacctgttggacctcaaggactccctctagggaaatagccttgcataggctggattggatggcggagattggcggcctctctaaaattctatctccgctatcagcggagatccaatcataaaggttcggggtgagattctcaaagatgttgatcaggttgataaatccgtacgccaggataggatcttccgagcaaagaacctgaggcttgtgaatagagctgcgcagcataactggtttcgcttgctggagagcataacctctgccggtttacaaatcagccccagtccaaacctcattgatcctgcataagcagcgcacttacctctctgtgataaacaaaagccagaacacacgccgtctttcctccgcttctttaaccccatactctgcatatgtcgactcgcgatgcaacctaagcgtaaatgcaaacgaggtagcctggcacaaaaagaaccaagcctgatcctgacgatcaagattcccgtataaggcaaacaaaaagaacgaagtcagaagtgactccgtgctaagtgcttccagaagatcacaatcccgccgcgcccgcacagcctccgcaagaagttcttccccagacatcaacgagtgtccacccccaaaactctgcaaacgcgtaggatccggtatatgtgttgctccgtccaatttcaactggatatgcgtagccgtacacagcgacactaaaagagcataccgctgcgtcgacagctgcccgggccgatggcaatctagccggagctggtccccgcggatcacgggcataatggggaacaaatacttgaggtagatattgacgtggacgagcaggatctgcggcgagagacggcgatcggccggcctcgcatagttgtaaccataaccaattgcagattcgacggttgagtccgtggagcccggggataagacgagttccgggggcggcagatgagaaaaagtgtccgagaagtcctggcctgcgaactgtgagtccgcgattccaaattctggcgagatgggcgagttgaattggtagtccgggatctcgccggtgccggcatcctcgggatatatatgctcgggagggtcttgtcgggatgagagagggtgaatcggggctaggggatatagggtgcggaatttggggcctttccgacggaggacgtcgctgtaggagcaggacagaagtagccgtttgcatttgtcgcatggtagttcacgggaacattttatttttcggcggcgacagttgtcgtatgcttgttttggcttgggttgcttggaggacattgttaaattgctgctaggtctcgactagacgcgggagagttgaaatttcatgttcaggtggaaatatatattaaaaaaagttgcgatggtttcatccggggagttcggcataacccccattataataaaaaaacaatgcaaacctggggaagcgggggagggcaaggaacagtgagaaaccccgcaaaggcccctgcgttagtattgtgcctcatattttgatcttattcgcattggcgtccttagggatatggcgattctcgctgctcttctagattaagggtgcatttcctctcggcccgacttctctctacgtctacgtacatactcccagcctccgaactataaagaatagacagaagaccaccatggggccaccatgaaaatctactcagtgacccctcattccagatattgttacgacttctaatattaacatggatcccagacctcggaccgtaagcgaagtacatatgtacgcctttgaccaggtacggggttacggccaagtcgggtttgatgcctgactttatggcgctgattgacatgtgcactaaatcgaagatgagggatttcttgccctggttaactggtttaatatagagtgggcaccgctaggccgcgctgagtatccatctccacttagaaagttgatattcgatccaatcaattttctcacagcatcaactgtttatggatagcttttgaactgtacggagtacggaataccgagatggatctctcttatatcgtcctcggcttcccgaaagtgcaaaaaggccttatctccttctatgttggatatcatgtaaggggttgaagcgcatggttccgctatggtttgtatgctttgtacagcttagacgaggtgggactgttgaccagttgaataatgttcctgcgagggtcccgaggttccagacttactccatccttgcgcaccttgtagttataagattatccactagagagaaaaggctcaccgcagcttgccataaggaggattatacgaagcacctaaccttggaagatcataatgatgacattataatatgtaagcaggtttctatacattaattccaggttcttgtattattctgtagccgtactactgtagacgggcatttatcggacaactggccaatcaccaccctggaatgacatggtcaattgtgatcggcggtctttatacaacacaggatggtccggagtaactatcttcctaggcaagtgatatcacattcacagtaccatttcgaattctgccacttgttggtctttggcatgggaatctagagagagatatacctcttcgagcagactctggattgcttttatgatatttgaatatcatataaacatggtctaaaatgcccatgcccctcttttgtgaatcgcaggtaggtaatacggtgtcgggtcgacgtaagggtccacattcaacccagagcccagccttctttagcgcttgaagcttaaccaaccccgcaaaaacattcagccacaaggcaaagtatgtgattgtggagaatcaacggaaactcggccacggcatatcatcgggccgcaacttcctgtacacttgcagtgctataactaactggctacgctcattataaaaacgagctggcatgaaaatagccccggtcgactactagactagcgaagtggttattatggttagcgcgaagaagcttcttggctgtgcttgcctcttgccagcagcctatggtggttacttaaaatccgcccctacggccccagcctctcactctgacattgcttcttcaacttcttcgggaaaatacacacagtttaccattcccgctagcgcagatgttggcgtacagcagatcgccaatattgatgaccccgaagccgtcgatgcgcagtcggtttgtcccgggtacaaggcatcgaacatcaaggaatctgctcgtggattgaccgctaccctgacgctagccggaaagccatgcaatgtatacggaaccgatgttgactcgctgaacttttccatcgagtacctcgccaataatcgtctcaacgtccaggttgtcccgacttatctcgattcttctaactattcgtggttcatgttggatgagcatgtcgttccccgacctacttccgacccttatgcttcaaagacgcatagtgatcttgagatcacctggtcgaataagccatccttccatttcaaagtgacccgcaaggctacccgtgatgtcatcttcgataccactggttcagtcttggtatttgaggaccagtttgttgagtttgttacttccttgcctaaagattataatttgtatggcattggagagcacatccagcagctgcgcctcttgaataatctcacattgactctctatgcgtcggatattgctgaccctattaatgagtgagtcacatttcccaaatatatatttcccctcaattgtactgctctttgtttctgactacttttatacagcaatatttacggctcccatcctttctatctagacactcgctactatgaggttgacaacgagggtcaccatatcctcgttgcaagtgacaaggccgatccgtctaaagactatgtttccttctcgcacggtgtcttctctagaaatgcccacggccaggagatcgtcatgaaccctgagggcctgaagtggcgcaccctgggaggtagcattgatctcactttctactctggtcctagccaagcggatgtgaccaagaactaccagttgagcaccatcggcttgccagcattgcagcagtacttcacttttggcttccaccagtgccgctggggttacaataactggacggaacttgaacaagttgtctccaactttgaaaagtttgaaatcccgctcgagactatctggtaaattgactcatcgtgccttttaatggttcaagtcctaacatgactaggaatgacattgattatatgcatggttaccgcgacttcgacaatgatcaatatcgttatccctaccgtgagggtgaggtgttcctagataagttgcaccgcagtggccgtcattatgttcccattatagattcggctatctatattccaaaccccaataatgcctccgatgcgtaagttcccctatgtctgttcttcagaagcaaagctgatttatattcagctatgatacctacacccgcggacacaaagatgacgtcttcctgaagaatcccgatgtaagtgagtacatcggcgctgtctggcccggctacactgtcttccccgactggcacaatcctaagacaggcgatttctgggcgaacgaaatcgttacctggaacaagaaaatagccattgatggcatctggattgatatgagtgaggtttcttccttctgcgttggtagctgcggatctggaaatcttagcatgaacctagcgcacccctcgttctccctgcccggagagcctggcaacgtgatctatgactatccggaagggtttgggctcagaaacaagacagaggctgcatctgcgtctgcagcgtcatctagccaggctgctgctgccgaaactggcagttctacctcttcgtccatctcttatctgcggaccacacccactgcgggagtacgcaatatcaactacccgccatatgtgatcaatcatgaccaagatggccacgacctcagctcgcacgctgtgtctccaaatgccactcactccgatggcgtccaagaatatgacgttcacagcctcttcggccaccaaatcctcaacgccacttatcatggcctgctgaaggtcgatgaaaagaagcgacccttcatcatcggccgctcaacattcgcaggctccggtaaatgggccggccactggggtggtgacaatgcctctaagtgggcatatatgtttttctctatcccacaagccctgtcattctccctcttcggaatccccatgttcggagtcgacacttgcggcttcaacggcaataccgacgaagaactctgcaaccgctggatgtaactatcagccttcttccccttctaccgcaaccacaacaccctctccgcaattcctcaagagccctatatctgggaatctgtcacggccgctaccaaatccgccatagagatccgctacgcaattctcccctacttctacaccctcttccacgaagcccacaccactggctctaccgtcatgcgcgccctggcctgggagttccccacagacccctccctcgccgcagttgacacccaatttctcctcggcccctcaatcatggtcatccccgtactcgcgccgcaagccatctctgtcaagggcattttcctaggcctcaagcacggtgaggtatggtacgattggtacactcagaccgccgtggacgcaaagccaggtattaacactactatccccgctccgctcgggcatatcccggttttcgtgcgtggaggcagcgtcttgccgatgcaggagccggctttgactaccaaggaggcgcgtgccacgccctggtctttgcttgttgctctcggcggcagtggagctgcctctgggaagttatatctcgatgacggagagagcaatgttccggatgacacgcttgatgttactttcaaggtcaaggggtccagcttgagtgccaaggcaaaaggtaactgggaggagccgaatcctctcgctactgttactgttctcggtgtttccaagaaacctggcactgttagacttaacggtatgcctgtcccagcttctggtgtggaatacaatgctacatcacatgtgttgtgtgtttgtggtttgcaggagttgaccaaggagggtgctttcagtgggaactggactttgaagtggtagatggtggaatctttcaagagaatgtagaattgtgtcttttattgtgcgaatctgctgtcttttctatagtctatcctaatggcaatcacattcatttattcatccctcgacacactggacaatccttacacaatggacttgtttcaagtttagtacataccctctccgttcgcaatatcttccgattgttccgggctccttattatcaaaagaccgagcgcctattgttatagtgccggcgactccgtaagctcattcagctgagtagagagacaccacacccccgcggtcgcattaacaaataggctgttcaataatccacagattctgtcgggccgacttatgaagcctatatatattttgatcgcatttcacgctataatatactcacattgtctctatgcatacggagtataagccttaaccatcctagcagcatcgcctaggccaatagcatcccgagtaaaccccgagttcatgagatcgacatcatctcaaacgagccgacaagccactgcaaccccatctccgccccccgcgtccctgcaaatttgggctccaagtccctgcgcacgctgattcgatcaacgcccgcgtcaggggcttcaacagggattgtttaatttcgcacatgccatgcgctagccttgtaatccgggctaataatttcaaggttatgcatgcattcttgtgactttgcttttttttccggcagggctggggacctgacgaattatatgtgaaggatgactatgggatttttgttttgggagatgatctttcaattaatcacggagttcttgaccatatgaagttagcagctctctctctctccttttctagtttcatcttggatatggctgtggctagggacgggcatttagagggatttacttctgatttaagtggaagcatctgtgaagatcttcgtctaagcttttagcgtctattggtttaagttatactccttctcggagtccgatttcgagagttattggcctccggtagttctatttgtctgtcgctgtatgcacggcttttgatagaatatttatatgaagtcccttgcagcgctttttgttggaatatcccgttgctgaacgattttactctctttccacattgattatcagcgctgaagatggttctcgcacgatttgcttggcttgctagcttgattagcattgccattgctgccactccagatgaatggcgctcacggtcgatctacttcatgctcactgatcgattcgcccgaacggatggttcaactactgccacctgtgataccagtgatagagtcggtttctgtctatatatcggctatgtgacaatgagatagagctaaccgtactcgctggatagaaatactgtggcggaacctggcaaggaattatagacaaggtcagtaatactctaatattacctatatcatcaagctgatcgattgcttagctggactacatccaaggaatgggcttcacggccatttggatcactcccgtgactggccaattgaccgaggatactgcgtatggctatgcctatcacggatactggcagcaggacatgtgggtatcgcaaaacagaaaagacagcccttgagacctgcatgcttacagaccctagctatgctctcaactcgaactatggaactgcagacgatctcaaggctctcgctacggctttacatgaacgcgatatgtatctcatggtcgatgtagtagcaaaccacatggtgagttaatgcatccatgtccccaatcatgcgggctgaaactgatatgtattggataaaaagggctacgatggcgcaggcactgacgtagactacaccaaattcaaccccttcaacgatgcgaagtatttccacccctactgctcaatcgccgattacagcaacgataccatggtgcaagactgctggcttggggatgacaatgtttcgctaccggatctggatacagagagcaccgaggtgcaggacatatggtatgactgggttggatctttggtctctaactactcgagtaagttgtcttctccaatcctcacttcggcaagatatatcgccatatccgaaaactaactggtatatagtcgacggtctccgcgttgacacagtcagacacgtccagaaagatttctggcccggctataataaagccgccggcgtctactgcgtaggcgaggtctttgatagtgacgctgattatacctgtccataccaggaggtaatggacggagtgctcaactatccaatgtgcgaccccgcttgtccatggaatttaccagatacacagaggaaactaaaagctaattgaaaatagttactacccactcctcaatgcctttcaatcgacctctggaagcatgaccgacctatacaacatgataaatacggtgaaatcgacttgcaaggactcaacccttctcgggagctttgtggagaatcatgataaccctcgttttgcctcgtaagtgaaaactcaattagaccaccggaaactccattctttatgtctagaagctaatatctctccttccgaaacccagcgtcaccgacgacattgccctcgctaagaacgcagtcacattcactatcatggcagacggcattcctatcgtctacgccgggcaggagcaacactacaatggtggcgaagacccagctaatcgcgaggctgtatggttgtccgggttcaacaccgacagcgaactgtacaagcttattgcaacggccaatgctgcgagaaaccaggcgattgctaaaagtaccaactatactatttaccaggtatatgcttgtctctatgtctgtcgaaaggaaggaataagagaatgtaaatggctaactcagtcttgacagaactacccaatctataaagacgataccaccatcgccatgcggaagggctttgacggcggacaaataatcactgtattgagcaatctcggtgcaggaggtgcagagtactcggcttcaattcctgatactggattcgcagctggtgaggagttgacggaggttgtgtcctgcgctagtgttactgccggtgatagtggggaggtgtctgttgctatggtgggtggagagcccaggattttactgcctacctctttacttaagggctcaactctgtgttcgtcgtagatctcgtgttcggggtattggtggtcgactcgaggctcaactacccgcctgtgatatatgtttcttttaatcaccatctatagttattgtgcttcgttggcaaaggggaatgcgtctaatgacttgattggtgcttttgtacttaccttggaaggattcatgaagtttgtatcatattatgttgatttggtgtttacatcgtagcgatgatagtgaattctgaaaaccgaatggagaatggagaatgtattgtaatagttgctaaatgaatccagccatagataagattcactataatgaataaaactacgaaacgaagaatcctcgaacaagtcatgactattttcattcaggtgtgcttttgctgttacgatcctgcgccagaaaaaacacaacacccaaatcccaaatctaacctcgatatcaacctaacatacaccaactccaatgatctagaaccaaaaggccaagcccacaatcccatcaccaatcatgtaatgccctcggcaccagaccaataggcatagccccaccagtcacaccagtcggaggagaatgatgaaacaaatccggagcttcaaacgcaggctgcggagccgcatacccaggcatcatctgctcaagacagttatacccctcaacaagggaatccaagccctcggagctagacataagctgcgagatatccatgccggtacgatgatggctcgacggaccgaacatctgcatgctcttaacctccgcaaccggggacgacgaatgcgaccccgcggtaacaacactcgcctccgagtaccgccgctgcacttcgccgacaatacacgcgatccggtaggagaggttgttaccgccgggggcgaggtgcagtaggaagccgcggacttggctgattagcgggttggtgagcgtgtagtcgtagagcgtgagcgcggcgtagccgacgatgaagtagacgtggtcgattaaggcgggtgcggaggtgaagcgcgtttggaggaattgggttatgattaggcgggcggtgccgcatatttctggaacgaggcgctcgctgtccggttggaggcgggcgactgttcggtagaggaggagttggcagaaccagagacttaggttgagtgttaagtcttcgctggtggctgtaggggtgtgtgttagattgagattggatttgatgtgcatatagggttgatgtacttagaagatgtgcccattccaatttccagcgctccaattcttcgtattcgggttctgcgaatcggagacggtgctggttgtgttgaagtcggagggcgatgcggtatagttggatttctgcgataattctcctgtcttctggtgtggcggctgcatattctaggattcgggggcattggtcgatgtattgttgttggatattaacggtacggccatttgcgagggcagagctattgggttattagatcgtatatccgacggttttaatggacagaacatactgtagctgggttgcgcagagtgtattccacagacgcaactgggcaagtagctcgtctggatttaaacgatctcctggcaaggtattcaggaagttaaatgagataagcgcatggttgattgagatcccgctcagcaaccagtcgtccatgagtccttctttgtgaatggaagtagagtatagacagagcaatgtcaacgcctgcagcatatcgcttgttatgggcgggggcttccacagcaccttcgccacggcatgttgtacacaaagtgagatatcgcggacagtgtattgtggtaggccaggcagatagcgcgaagccaagagacatgcggtgttgaagaggagtgtatttgaccgttgaatgctggacggatgatttattgagacccaatggccgaaatattcgacaaaactagcaagatgattagcggagaattccagtggcaaacacacaatcaaacacacagttcaatcaatttcatagaaagcttggaatctacgatgccctgggtgacgatatctccgagaatgtcggcatctgataattgatctctctcgccgaagcattcggcttacaggtctcgaatgagttgcgctagcttgagcggatagaaagatgaggacatgctatcgcttaaagatattccatctatgctgtggtttctagtttgtaaggtggggctgcagggcatgctgggggagcggttcactatctgccgcatcagatgtatcatctcccccatacctcgttcgagagagacaagccgttcttcgatcgatggtatagcggtggcgttggaccaggttgatgcattgtcctagaaccgctctgttgtctccgggagctcgcaatccagcctgttatgacaataataatcagcatatggaaacgacagactccaaaaaagcaacagcatgaataaaaaggccaaacaaacctaagtgacaagcagcgacgacaagaatgaccacggggatcgacatcacagcgagtcttcagcttgcggcaggtattataagcagtcattgatcgtcggatgcgcccttttggcctcgcatcttgacacgcgaccgagtcaattcggctgctatcatccgggacaataggcttggtgtcccacgagataggattaattgtagggccggttctcgtcattgtattgggtgttggatggttactgtgggtattgaaggtatgtaggtactgtttaggggatcatctatgtatgatggaagaaagatgagaagttggagagtaggaagagaaggctgatcaacaattggacccttaaagcaaaagcccaaaatcagaaacctgaagatcatgtctatcagggagatccaagccttataatagcgggtcactagagcactagcccgggtgagggcttttagccaattgcgacaagaggccgattactgacgatatcgtagaatccgcgcaggtacatcccgttcatggcggattctagcggaccatggcggacctggggtaatcgaatatgcatccaccaatctgaaaacttcccgccggcttctagaaaggcagcgattgtcggtgcatactttgaggaggggttgataatgtcgtattaactcccctggcccagtttctccgacgagaaccgtaggagaggggggttggagtgggctgagtggcccgatctatactccatacgtccttttgcgtttgattcttgacttgttcgtcttatttcaccagtccgaggttatcgtgggatcctttcccttttccctatctaatgcaactccttctttgcgtatttgtcttgctcggggacttccgccataatcctgatctagacaaaggtctagcataagaagggcagaccttgtagtatgatttggcaatgcctctcgttaaattcgtcctaagtggggggaggttgaggatccaagtggggagggacaacaggcacacaacgataactcggcaataattggttagcatgtgcaatgtctcaaagggaaatggctatcaggcttggggatcgcagcaatgtcaccttgtaactttccaggcccgcttaacaacggctatcctgccatttaatacccttcttgtttagcctcgagatatggcatttccagccgtcctttggctgctttttgttggatctcataggcgaatcttgtttgccccgttctccattttaattctgttttagtttcagctaaatcaacagccagaggatggtatcatatcacattcatatcattgacagcgccgatcgcactgcaattaagatcaacctcaatcttctaagaatatatgttaacgtccttgatcggcctcgttaatcaaatttcaagaccagcccaggatgcaaccctagcaattgttccaatatatcctaaaattgctaatcgcgcaacgttgagtggcaatgcggaagaatatatattagtcgcccgcggagatcatccgaggcatctttttccctggctctgaatgatccaccctatccaagtgcaatataactttcatgcagaggaattactcccgaccgttccgattcttagtgctcttttgtcttggatgcgggaatcccggaccaagaagcggtcagtttaaattggttaatacgcgaataacgtactcctgatcaaatgctggattggacttgcttggctcattgaactctggggtaacagttggctggccaggtccacagccttgacaacgacctagccgacattttcacctcggcctggctcgttatcgggatccttgattaagccccattatgcgagctatatcgagtttattattaggtaaaattttgaatttagcgtaccggaatggcccgtcaagctatgcccagagatttagcgatgcgcctcgaacggctaagatgtgggttggaatcaccgacaagggtgtaggtataggtccagctttgataggaggtaaatagagtgctagacccagtgacaaatacaacatcaccacgatcgtcgcgttaatgcgctctcaacaatactgttatctctcaagttgggagaagcaaccctcgatgttgtagattctagaagatctttctacagaacgccgatcgcatcaacctgtctcgggtaatgatactgagaaagtatatcgctcgcttcttgacggcacagcaatgcagtggcaaaccttgagtcgcggcgcgcaagtggaaatcacaggaagccacaacccctcttactactctttatgagcgtgatgcatcgacgagggggtcaacaaggcaatacagtcagatcaagctgcccataccaatatctgattggctgacataaagtttcccccctattccttcttgcttctctgcatcttccttgcagggctgtctgactcctccaatgaacaattgccatgaaaccacgcgacttggatctaattttccgagagctcgcaagctaggcgactttcgatgcagacaaggttctcgacgtagttacttgcagggaataggtatgcatgctcagagataaggactatttgactactagatattcctatcttgtttagagacatgagctacgtgcacatctttgtgatgtagatctctcgacccgacccaccgtgtctaaagctagcgcacattatagctttttgtccaatgcactattctagttgtacactccgtttaacatagcatcccgatacggccaacatgcaatatatgtgccttgtttcacgtgcataagctttaagcttggacataatctccggatcgggatttccttgctagcattgacagaaggactcccgggatcctaggaaccccgggactccggtccctattatcgaccaagagtcgcaagagccgaagctttcatctagctctaaaagctccggggcgttttcaggctacccgcgggataagtcttgatttggaaattgagtttttgaatatgtacggagtatgtatgtatgtcgagaatatgtggatgcttgcagttgtttagattgcgtctccgcctgggtgcttaggaaaccgttgggttatgtctaactataacgtgcagtccacagtatacacgtgtacattgcagctgatgaggaatattgattaggagactcgcaattcatttaagatcgctgctttcacatgctcggcttaatttcccaatgctagtaccgtgcttcgatgcatttctttctacaagtcaccttgtatattaggcttttcgtcatttaactgcctgctgcgcgtgaccccttctctctgggactacgagcgtcctgtcttcctatttttctgttctcatcgtctccttgcaattttgctttgcttccctggcactgtcgtatatgacagactcggaaagaaaaaagagagcattgtcaggtatctccctagcaaaaatgcgatcgcaacaacatgttctaagcttttacgaagcctaagcaaaagaaaatccaaaaaagaagtgaccgacgcagggatcgaacctgcaatctcttgattcgtagtcaagcgccttgccattgggccagccggccttgttatggacagttgtgtggaaatgtgcgctataagcgaattcttgtgggacacgcttatgcccgcttagacccgcctattgcacacgtgactttgaatgagctgctacaaacatgtgatttgccaaatcaaggcttgtagagttgatattttgcgtctgattgagtaatactacgttcgataagtggcacggttttctggacgcgtttatcacttcttattataaactggattggttgcctcttgatccgattgtatactttgaccagtggtgaagatttttctatgaaaataagattaatgactgcgtgaatgttgacatatttctagctttatagaatgccaatgtggagttaaatagggtagaaatatatgatcaatgtatttaatgtgggttgttgttgttaattggaaatatatagatgagcgctatgttgaatatagtatacattcaaacaggtggaaacaatgctaagatgaggagctgccataacagccaaagctgaaagatgttctgtgtagatccaaaagaacgtgttcataaagaaattatcacggtaagtctaatagaagatgaaacttgcgtagaagacatgattgaaccctagttttggacatcatggaagatccaatgaaggacataaatgttaggtggccagatcccactactaaatagaatagctagtctcgtctttcctcccttttcctctcctccttgtccatcattatccatctcaatctacacctgtcactttctctcacgagacgttccacctagtagatctctatcaataaaccatttgccttctatattacacagtgtggtgccgcataacatgttgttcgaagcagttttgttcaacatacagtcgtaaagaaattctgacgtacgtataggtctgcataagagaagagatatgatcaaccaaagatgataattaactgtgtcagatggatggaagaagatgatctagctactgccatcaagctttctaaatatcttcatgtgaataaagttacaaaggtctcatcccaaagaacccagaagaaacatctctgcagccagataaagagactgccaacacaacaagctacccgtgagaagggaacaagaaagaaagggaggtctacaaactgcataggaatagtgaaagccctaaatacatcaaatttgtcttgaaagcaggaaaatggtatgagctatgcctcgttgttacaagagccagaagtagtaacagagcgatggtaaggtatattgagccaaaccaatacagccatttttcgaaaatagctttggcaaacgacaaccatcaagcccattatcacatagcccgagaataacaaaggtaggcacacgaatatgaaatttccaatagttttagatattcgatattgaaatcgtagtagcaaagtcaagatcaaaagaaagaataaaagagactaccgagacccgagtcctacaaacatagaatatctcacggttataccacaaattgcaaagggaagttatattctagtagcaggtgtttacgagcagaggtccagccgtctgaaattacccgccaagagaccaaggtatttatataggcaatccactagaatagagtcctctatcagaaggtaggccaaatgccacgcttgatactagagtagtctagcggtaattgtaagaactgtgcattgctgtgcctaaatgagatgcgcaggctcttgaataccttaggcgatatgcctgatacctgacatcttgtatatattttctcgtatttcttcatggcattacatgtgcagtacgcacgactaaggcctgaaaattgtgcataagaactagccaatgcacttatttactacttgcatccacccttgcagaactgtggcggctacaagagaatggtaacacacagatgaaggtgtgactacagatatcattttcgatatcacaagaggtgtgagtacatagcagcattcactgctagttgggattagtagttatatgcgccatgcaacgtaatcaagagtctatctacgtagggacctggacatgttaatcgcaaaatccagtttagaacgtggctagccataccctcatcgtaaacgaacaaacagtatagaatctagtggtacctagacagaatctatataagcccataatgatacctggctcatagcatcgaggaaagagttttcatacatcgtcgactcttgtagctactatctatctcgtctacgaagtataacctggttcacaaataaaaacagacccggacgacgatccttgaaaaatggagaatgcaagtgtcaaaaataccaccacggccagactaaacggcactattgatttgagtaattagtgtacagtgggtgggtttgccgatcattcatctggaaattaaagattcaaagtttggaagcttagacatgattaaaccaagatcatcgtagccggcctgtatgtagcgaggaaaataaaaataattatcaacaaataatatgccatgatccaaggtagatcaagggctgcctcaattttaattcccacttcaacgcgaggacgaccatccaatatgtgatcggattaaatcatatcacatattatactgctccgcgtactccgatccaatgattcaaagatgtatgaagtatggagtacaacacatgtgctcaggcatcgtccaagtcccacggagtatacggagtatacggtgagactcaagctcgcacgaacccatccatcgatctacacgcgatcgtcacaacccaaatcctgacatgagacagctcacgaaaatcaaagttgacacatcccatgggaacgagaaacacacatctcctccctcattaagcagggacgtcgttgggatcgacatgcacgttcccggtcgaggcccaaacgcccatgacagcgcagaagagaagacgcacacatacgtagcaagcgcctagcatgtatgtagggtgtacggagtaacggagcacagcacatgcatggtacttgcctatatagtcccaaggttgcatacttgcgcttgcacgcaacgaaatgtcagacgtcgatttcaccgctatatgacgggtcggatgcacgtatttggctactgaatggctaagtggggttgtatcgtcctcgcgaggaaatgagggtgaaaacggaatctgaaagcgtgaggtgcagcaacggggtttgcttgggcttcggttagcagataagtgacagggaggtccaaccgtaaggtagggagggggtgaaggtttccatggactgtgattcggtcgagatcgacgaaaagctgtaggctgtatgtatgtacgctgcacgactttgtcgagtgcgttttgttttagatcgacgagtcgtggtcgccggatatacggagtgctggatgctggggtttccaaggttgtgccagtggcttgcatatccgctgccccccctatgtgggactgggtcacggggttcgtatagtcttgtattttggacgtatagcatgcttgcttcttctagttttgctttttatgatgttgaggtacatcgtgcattctagatatggtcgcgtttgatatttattccctaatcttgtttctacccgccccttccccttttcattcgatgcgttggatatcacttttacaatatgagttctcagtcccctcactgacgtctccaatttagagctatgatggtagaacccacatcggatattgtacccaccgctgcaaagaagatggccgaagcccaagatcggcagtcaggtaagttttcggggtcatgtcaggaccccataattgtgttcttcgggcagctcgggaaatctaaaaacctccctaacagatctgtctactagttgtgttgtcggtacgatattttagtaatgcgatgtgattggaagagagttgcatctgtctcagttccaaccgcacttgattcagatatgtctcgatcggataaaagggccaataaataatattcagcatcccattattgcaaatgtttaatcatatgttcaaccccacatcgaaattaagtctggtatttattgcctcggggctgtcaaagggaaagaagtgccgaacataccccgggctcacgtggctggcacggagtaaaagtaaattccatgttattccagtgtcggcctttgacactgtgacttgcttcttccttattatagtagggtttggcagtgtagaattgtctacattgtaataagcccatgctacgtcgcactgtctgaacaattcttagagaagtgctacggggtttctacgacagcacagccagtcacgtgaccacatgacacgcgctagtcacgtggctacccgctactgctatttatgccaaagggggaaggagctgtgtctctattattaggtgtgtacgacgtcgatactggtaatataatggcagcatcaccgtattttgaattcatggcacggtggattgtagatatgtggactcaacggagggaccgaaaagctgaagtctaaatgagactccatgcagctgtcagttcacgtcatttggaatttattcacaaccttgaaagttaatacttcccacaattctagaaacgcaaaatccaatgcaacctcacctctcggtaaccgcgcggactgaactctaagcgctgccagaaagtcaaaaagaacagagaccgtggcaggaaccttgaaatgaggttgaggttcggtaacagaaggaaaagccaaaaatggggtcgatcttgacagcccgggtggagtacggagtacatgtactgttttagaataatatccactagtttacgagtctatcaatttggaattgattgaatgaatagtgcaaaccatggatcgcgtagccccagtctaaaaatcatgatttctctatcgaaatattttctgggtttagaagtagaaattgagagaaaaacaagttagagagatccaaatactttggatatctactccgtactttgcacacgtatccatatatgcatagagtaaatagaaagcaatctcagtccacaccggctcgcaataccgtggagatatcccccccgaagaaaaaaagtggtgccatgagtcgcaggtaaggcaagatccaggtttccacgggttgcgagccagactatggataggttagtcgcgatgatggagactaagtggagacgggttgcgcggtggacagctgagatctgctccgctccagtatctccgtgttgcttgacatttcagatcagtattggagcgatagaaccagagtataatggaaagtgaatgttatgatttgaaagtcgagtattcctctaaacgcctagtaatgcaattttcgcgggttttgtccagtggcactcatggaaatgcggtgtaacatggagggaaaaaacatgtagagcaaatcatagaaatggtgcgatggattgccaatgccataatttgccgtatacctcttgtgccggttgataataagttcccgcttggtaaacgcgaccaaagaaagggtatcaaaatataatgtctgaccaaagtctccgtaccggacggcaatgcgacatgtagagtgaactccagagacctggaaggtaaggaagaaagaaacaaagcaagacattaaaaaaaaacacatggaaaaagaaagtaaaaagccagtctatcaagctcgccgtatcctaccccgtgactcgtaaatggtagggagatataatataaaagcctcccagtcgtaaagtaaataaaacgctgacgttgcgaatgccgtgtaacgttgaagaatgaacagaaagagaaaaataaggccgtaatcgaagtcaaacccccagatgcaggttcatcgcactctagtgacgaggagagggaatgtgctcatcgacatcactaaaaggcgactgtcgttgagactccgtatccgcaccactgcgcatttggttccgcagcgcaggaagttgtcgtctccgagcattgataaaccagttactaatctgtccaaccaaagcattagcaagccataaagccaattaccagtccctagtcataaaagcactcacctgactgatcgaaagccccgtcctcgtcataaacatctgcttatcctcctcactgggataaggatgatcaagatgctcatggaaccaagcccgcagaatatccgtaacaggcttgggcaaattcccccgtctccgcttcgtcttaggatcaatcggatcacccataatcccgaaattcccctgcccatgccccatcatctgcggcgagatctgctcatcatacccgatagcaggatgtccgtacggcgactggggatgcatgatgggctgggtaaagtgctcgccgcggggatcagacatggctgccgtcggcgcgggctggcgatattcctgggcgatgaaggggtcggagcgtgggggccgctcagaatacccgctgctggcggacgggttcattgctcgaccgggcatggagtccaggtcgcggataggggggagaattgggctgggcccacgggatgcgttctcggatagatgcatgtggtggtggccgggatccggcatgcggggttggtggtctggcccgcgggagactgtgtattcgcggtgggattcgtaggggatttggttgggttggttgccatatgagattgagcgggggtcggccatttcgtggcttgagggtgggcggtcttgtgagtggcggggggtgtagaatggggaggtagattcgatttcatcgtggaggtgagcggggaggagctgagagaggttagatgttgattccatgttgtatttctaaaagcgctttagggtgatatcttacctctctgaatgaggggagggtttggtgagggtgtccggtcgacgactgggttgtatacgaaatagccatattggtatgttcgtctacctcatgggactgtgacatagacaaggtatttggggagggacaaggatagaagtgtccggatgagtttcacaatgtattacaaaatagaactatactcgacagttagaatggatatcagacgagtttgtagttcgaggcttcttcagcaaggtaaaagggaagaaggacgtatccaagaagcactcaccagggaaagcaggctgattttacgttgacatggtaaaataaaaaagagaaaggccaagattatatgcaaggttggggaatgagggtaaagatggaaatgcggtttctcaaataatgcagggccccgtacattatttcaaccaaaaaaaagtggccccgaaatctacattaaagtaaattcaaattaaattaaaataaaaagacatatccagctgttacatgtccatgggaaagtaagaacagggggggccgaaaaatgacgatcgtgggcttggtgggtacatgagtcggagagaccagcgctccgtgtgaagggcatgcggagcggagaagggggcgtaaatcaagagacaagtgcgggattcttaaggttgacagatagagtctttctttgagtctgtcaatggaatagtcttagcgtcaggatctatctcacgaactcctcccggttccatatagcgtaggttattgtaggagtcccgatgttgtgattggatgtttcggggtaaaggagtttgaggaatattgaaaatcgaataattaaattcaaaaagacgtggttcactagtgtacgtcaaattcgagatcccatgccaggccagtgcttataagcgggcagtattgccatttacatgagctggaaaagacaaggtccttgacacactaaggaagatggaacagtatacgattacggaggacttgaaagtacgaatgtataaaagaacaattaacagaaatatactccgtaccactacgtaggacaggttgcatgttcagacaggggcattcgtgcctgagtcaggccaagtgaagtatttgtctgtaattaatatattaaatcctcacctccactttgctttttctggggatttaagagattcagcactcggtacggactacggagtacggagtggttcgtggcgaaatcaaaaagggaacatccactaccatggaagaggaaataacaagcagaatcgagagcctttcgcgtaagacccaaaaagcgtcccaggtggatcttccagacaccgaatcgtaggaaaagatcgccgcttcaagcagaattgtcactggttccaaaaagatcgtgttccgagaagagcttaagccggtggggacgaaagacagacaggttctggatttagtttggacgaatcagaatccgcagaggtgacgcctcggatcgatcgtagattgcctgagcctctcatcggtgggcacggtggttgatcgaccaaccggaaagggagaggggctggtgctggcttacagggatagatcgcctaggggttcttcaatttgcatctccacttccttcgagagcttgtggcgtctagggcctttttttcggtctctttttggcatttctttcctgtcaccgtatgtcagatcaaggatcacccggagaacccgctttggtgttttccttttttttttcccccatcctgttttcacgatattatgcactgggctggtgagtgggtgttgatctgattggagtgaaaatacactcgcatatgatatctcccaggtgcgttgcattttagtcatttggattcgcatgtcaccgatcgtaaattgagatttgcgctaattaggactcgcgtatcgcgtccatacgatgtaatctggaccactatattctggagcagtttctcagcttgacacacacacggcactaacagacccgctctagcaactagtcacattctgagaattcaataatggcgcaaatctgtcatgtctggggatccctggactaagactaaatgcaagctgagtgtgctagtcagccaatcaacgcgggatgatggattcatctttttgggtgatttttgtgattgcacagcttcctaaaacaatctagaaagtaaactaaatgtactaaatgcaagactcatattgtgtcgtatatacatccaacccctattaacctgtcttcatctgacacccgagtctatttagttcaaagtttaataaaacctaacactgcagtcacctcgggccctaaggtaagtcctttgggcccagtcgatccacccatcaccaggaagatccctttcgaattaaataaattcaactatttcccgatcggaacggagcgcctcgaagctttggatctaccgagacttcactttgattcgccgttctgcagagatctggcatgaaaaatcggaactcgaaagtctaatttaatgaaagtctcaaaccgaggtcctccggactcagaaactaactaagaaacggagaaaaaagaaagaaattggcattctaaccgaccgtcatacctgccatgccctgagacccccattcacgagatcagagatcgtgcatgaaggaatgcagatcatcggatctcgcaggcaaccagggttgtccctggcgaaatgactgatctgaaatatggttattggtctaaagccgatccattagaggggagatagagagggtcgtttctctgcctcttgcatagtacggagaacggagtactatcggctcatatacctactccgtaccgtcggaggaattactccagattggtgggagcatataactacacatgcagtatttgtcatttccatttcccggttcttgggtctccggctattttattttattttatttctttttcccatttcggtctaaatttggctgtccaaccttatttgcatgattctgacatttgagcttccactttgtccattataaggattctaggtgtcattgccaagaattacttctagaaccaatttcctagcggcataaaactctgtagcatagtaacataataatacaaccttaggcatcccaaagggcccctctgcataaggccaacccgactacattggtactaactacatttctttcagcatgtaccctgtaggcctggacaattcagattgtttgctttttgcctgcccaaaacaacttagactcgtgtcaccggaggtgtatccatgcatgattccggtgtgccaagagtatagttcgtgatgaggccaccaatccttcgtcgccatgtaaggcgatattacttactcttttctctattggtccgatcaatactttactaatttacatgggtcttgctttttagaatgacgtaggtggggtcagaagtctcttgcttgaatgagttaggcacttaggcagtgcccggacttataattcctgtccccgtggagtagtatgacttgttgggtcgtttcgagggtgaaaggtaacgacaggagcccgggtgatcggtcggttatgcgtgagtgcctgactcgggactagagcctaccttgtttctttgtttgctttatgctcagttggcgtttgctacccttgtcggctaaattaaaattagaatcgacatctagcatcaccccgctcgattaggaaagactctaattatatgtgagatgtctacttcctgctacttcctaatgcagtatcattttcgttgagaatatatatcctcctgaatggttcaagccagaaggtcatgtacgagtatggagcagcgaggaagacatagcccactatcatatgtgagggatcgttttcgtacctccttcgatttggttcacaaggtcccagtttcggagacttagcaagactaatacaatttgagccacatgccaaacaaaagcgagggatacataaccgaagttcaagtgcttggattgtttcctatctaaagatgcacaaatgtggaattgcatctatatctgtcgtagtcgcaacaggaatttctgagcattcccacagcttcgaactgagagcgtcgctcacggtagtggaacttctttcggcttgcacttttgtgattactctgcgggcaattttctcctgttcaagcgtctccactagtcgtatgactctatttcgcatttagccctcgccatcggactgaagtctccagcctacgaagagtgaccccacagcgcatacccgagatattgcccggtttgttcctttgcctttccggttactgagcgcggcctgcgacatcgctgatatatctcgcttcgtctgatcaagcccaccagtgacatcaccaagtcctcccgatcgagatttcgcgcatatcccgtagtaaacatcgatgtgaacttgctgtagccaatttggaggcaaggagtgaacgtcgatatttcggttggctagtatcttttctcggttgacgtgggtagtcggtagagaaaggaacatgactggctcggtggctgatgtggacggcggcttcgccaggttattgtagggcacaagggtctcagcctaccaagcagcaattctaagctgccaaagggggataagaagcactgccgcacctcgacccctaccatgatatagcagtgtgactgttgacgccacaatgtataggaagatcatcgccgtcgacgtcttttgggcttctaaaaagaaggcgggaaagaggaggaagaatcaactgaatttttatttcgggatcctattatagtcccagaaagcaataaacaataaggtcttatctctgacctggagcaagcaccatatgatctcagcaacgtaaatttcgacctcgttgaagagcgataagtgtgttattagcatatctgcccaggactcatagcttgatactcaaggttctagtgtgcgtatcgaggcactttcggatcccgttcgactcgaaatttcatctagcacgtcccagagttgttgaccttcctgtgttgtgatatcagtaattataatgaggtctgggtgagcctcagatcgagtttgcacatcttggatggtggcttccacaatggagtaaaggagatcaagatgtgaagtattgggggttggagtcaaagcccttgcagaaattctgatgggaaggagttctgggtttattccgtgttgtgccattttgacagtaaggtgttgagaaagaaagtaggaaaaaattcattagatgacggatatgctaccgcctcatatatccagaagaaagatagccaataggagggcagcgattggtccataccatggttcacctgcgtagaccattgaatgcttaactttatttcttctatgtcacaggtatgatagattttaattgtatattcgactattatattgcctgaaggaaaggttttacaaattaaggagtactatgaagaaacggtagacaactcgacaattgtcaattgtcaattgtcttatcattataagaatacctcaatcaaatcgttgactttcacacaaggagatcaatcatagtccagcacagcagcgagggtgctagatactaaattaatgaagcttggggctgctcctgctgtggcacggagcaggacatcgctctcaccatgagttgctaggtcgcgcagccaactatccacactggcaacggatgtatcaatttgggagcgccattggtcataagtctcacactctgtgattgaggacacagcgttgattgcatcaatcaggggggagatgtagatcggtcgtgggcggtggctgcatggatggaggggctctggccgacacccttcaagcccaccatcgtaccaaaagctagggatacagacgggcaaatcaaacccggacgtatgaccctgcgcgcagatgagtcgtgggcggacgtacttccaataaccaggcccatggcgttttgatgtgtatgcatataagccgctcgctattgcgctcaatcccatcgcactaggagagcagatggtataccaacggagcgctgcaagaaaatgagtagcccaagctttgcccatatcgccattgagaaaaattgcggctcccctttggtccccagtcataccgtcataccctagatttggaatctgggccactgtctgcacgacgacagcaacatcgactactagcgtgccatcgcaagcgacaaaactgacgcctgctcgcagggccatcattgaatagaactcagagaagctagcctggtacccagtaggctggagattaccagcaccgcgggtcacgaaagtccacaaagtcgcgagaatatctgtctctgtatcggcagtgaacagcgatttagtagagccgagccaaggaatagtcgtgattggcggtgccctagcaccggaaacccgatcattgagccatgaacaccaggtgtccaaaattggtttgaccgaagaatgactggcgtaaaagtaccagagtcctccgaacataacggtagcaaacacgtattcagcactagaaacgatagacgatttaggaattgtcgggcggtccgtggcggtgtgtataaggttatccttggcgcccttgacagcgtttctcaagttaaaagccgacagcatgcagcttgaagctatctggcacaaatccttcggccccggggggcctgtcttcatattatcctcaatggactgtgacatagtgaacaccggggcttgaggtatgtcatatatacttgaagctggcggcaaattgcattgtggaggcgtcaatcgtacaccactggttgattcgaacactgaaatggcccggtctatgtaattgtcgagaaggggtataagcccttcagtggcaatctgtcgggggaaggctggatggcgggataggaactccagtccaagcggatcatcactgctgctaggcagtgatggttcaaaagaccaatcgctagaggcggcgaagtgtgcgaagaaagcaaccaagctgcgggcaaacagttcaccatctctgtcaccacacagatggttcatcactccaatcttcagcgttgatcgagaggcagtgctaaggaatttagcacctcaggaatattactgctgatgtctcaatttgctcacttttttcaaggttataatgatagggggcggtgatgaagttgtttatcaaacggaatgatgtttagtcccaagtatcggaatttggaatacttcccgacaggatttatcatatgagattatgatgaaatgaccataaacaatctttaatgactgccacacaaggggatggcaattgacaaaagattgtgcgtatgattcccacggagggaaatggacaggagagagaaaggagaacaaagaagagataagaaaggagagaactagctcactacatggtcctatcattagggacctgcgggcccaaaacgatctaactcatatgtagattagcatctggtgtgcaaggggttcgaacgagtggatgttaaatagttcgcacccccctgtaaagactagctactagcgggaaacacgcaatgggacagctgcagacatatctaggaagtattcagagaaattgccaaggggagaagcctggaaccactggggcttatggtaagttgatgagacaatagggaatcaggaagacagaggagtgtatgactagctctctatatgtagatactattactatgtatgacttgctgggtcttgtagctgactatttatactggcaacatgtatactaatgtaagagcgctttaatcagaagtcttacacttgcatgacctgtagagcctatatcgccggcgattggtgtcggtcctgtgtcgcttgcttctattgtgtctagatatatcataagccactggcctgaactatcgggcatctaccccaaattctgctgcctatctcaacagctcgccaagtcatttataaattcatgcacacagccatggtgaatcatcattggagaaaacctgtcttaaacaaaatccaataacggtatataaaataagcgcaacttcctgtgcgttggcggtgagccatgtcactgcccgatgatggccaacctgatgcaggggtgttgaaacggcccccgcctcttgagccactctacggggaaaaaatacatatagatagacttcattgtttttgcagtcagtttctctatttcctttctcagaagatgaacatcaaatggagggttgaccaggtgccctacacatgtcccttgtgacccgataagactgtctcactttgtttagctgcatagcttggcagggtatcagcccgtttacaaggctgagttcatgcggggagccctgttggctggaagaacgcggcttaaagaggactttttccccttttatttctttcctttctccttcttccctcgtcggttgctttttcatacaagctttttccaaaaacgaaatccatcatgcgtataagtttgtttctcgcaacggcgctagccgctctcgtaaccgcagatgaaaccaccagaatcaactatttcgggggcggaatggagtgggttcgtcaactgaacctccacccatggaccagcacagctgccagcgtcgctgggatcaatgccgtcgctaccacctacagaatcggatgtctgagcgatgcgccgaagtctgattgcgagatcgctacaccctggaccatgatccagggccccaaaacctacagtctcacgggtgtctataccgtgtcaggctcaggatcgatcaatgctgtgactggaacccacaacttcgattgtacttttgccaaggttaccgagtctccttcttgttcgtttagcgtgaaagtcaccggcaccactgcaggcgtttcctattcaacttccacctctacctccatcaaaaatatgccaacgcagtcctacacctcctacgggatcgatgtcacggccggaacagctttattcactgccagtcaggcaactaagactcccaatggggcagccgccatgattactgctgcgccaatgggggcagccgccgtcgtggcaattgctgctatgctttagtgatgggttgactctttgcacacgccgtccctattttaccctggccttttgggtagatctcattcgacgtctcaagaacaatgtttctttttttaagctgcctcagagtgcttaccactacaccgctactttccgtggagcagtcactcctcaatctcaaattgacggcatatgatgatagagaaatgggacaaaggaggcagtcaaattgggaaggtcctcattctggtcgcatgcattagctgacatgatgctagttgatggaataatagggtagagttgtcgggactccttgatgtagctgagactgtcccgaagagagcagcaaatacagcattacaatattgggacagtgtatggagaatgaatattcagatagaaacaaatattgatttatgcatgttcaactcaagactggaagaaagatcacaagggatgaaaccgaggaacaagaactgggataccaaaatataaacgaagataaaaacagataaccacctcgctaaaatgaacatgaatcggacaaagagcaaaatgatggaaggccagtcgacgacctggtcgagtgtgtctagccatggactcgtaacaggaaaaaacaaacaaccgcagagcttttacatgcgggcaggaacaaatatgtacaaaggaaagaccaatgttttttgcatatgattgtaatgagcacttagccatcaaggcataatgcgtcaagccaaccacgtataattgaagtgatcaccaagtttccttacagcaagtcagcatagcccataaacatcaaaacacatcaaaacttacagcaatatactgtccagcctccttcttccgctgccagaacatatcggcctcttgggcattgagattacccttggccatagcaacatcaataagggcagcctcaacaccctcacccatacctttacccgaaccacaaacaaagacacgaccatcaagcgagttgatcacaaaccaaacaagatcagcctggtgtctcacctcctcttgcacatagcgactctcgcccctacggctctgcacaacagtgcgcaccttgtcctcatgcacgccccactcgcccgagtaaagctcatcaaggagcgagtccctgacaccctgcagcacccagaccttattggcgcagttagccgactgcagacggcgctgcacgaagccgcggaaaggcgcaatgccaacacccgcaccgatgagcagcattggaccgtccgaggcaaaacgcgttgcaagcgggttcgccatcagtcctcggaacatgggtacgtggagatcgactttctcgccagaggcttcggcggcaatcgctcgccgtgcgagggactccaggaacccggaccctgcgcctgtgcgggacccaccgcgccagtcatcggattcggcgactgtgacggcgatctcaattaggcgtcggcattcggtgcctttgtaatggcaggagatctgggggtcttgggagagggagtagaaacggggcatgagggtgttgagaacggagagaagatggtcgagaggtggttgagagcttgagaaagcggttaggagttgggtgagggagacaaaagagcttgtgcgtaggtcacagaatgcaccttgaccttgggctgaggacagatattcgagaattttcttctcgtttggctcgcttgtgtactcggcgaggaggcggaagagtggctttgttggggcgtaactctggatgtcggagcaccagcttaggacttcgcgacgggtagtgatcagctcgcgaggcttgtcgtcgccccagattgtcggccagcggcctttggttgtgcgcataaggattttcttatcgcgcatagactttgggacacctaggaggttgaggacctcttcgacttcggagtccttgttcttggggcacacgccaattgcaccgccaactacaaagtcaaccatcccgctttcggcggggtagtcggtgacatcaatatcaaagtggtatgtacgtttctcggcaccaggccctgtcagctcacgggtgtggaatagaggcgcacggtagacctggtaaggtgggtgcggctgcacgaattccggcgggtggtctgcagggccaaaggtaagatcgactgccgatgccgggatcggcttgaatgaaacggtcttctctgggagcggggcaatgttggaaagttcactgtccatggtgaggagatcgaggttcaggttgaggctatcaaaggccttgttgccgacaggtccaacgatggaattgaagcctgagatcggtccatctacaggacgcaatgcctgtccccggcaacaacccccaccacagcagagggattgaagcttctgagtacctgctgtgcccacattccccaacacccttcgcatgtcgtccgagttctgggagatgaggacagtagatgctcgtcgcctttgccggacatcctcgaccttttcctctgcattttcatcctccgattgggactcggtgggtggagtcagagggctattgggagaattcgagccgctcgatgcagtgccctgggaggagcccgaggagatgacgttgaaattgatgtcggttaccgagagagaacgcacacctcgaggctcttctggaattgggttatctgggtgggaagtcgaggactttgggatttcctgataagtgcctctgcgggggcgggaccccgttgacgcataagtcgacgacggcatgatagattgaacggcatgaactaattcgatcagcatgtgagtctgggactgaattgggattggggtgtcctccacctacccatgacgaaattgagaggagtgttgggagtcaccgaaaagttgtacaaaagtcggcgcaatgagggaagaccggggtatatgagtcgagacgtgacgatggcaaggggatgtagtagaacccccttttttctctttctatgaatagagcatggaaacagaatagtgggatgagggaagagaaagcggatccgaagaattggtcgggacgatagttccgtaaagagaatcgggaaaatcgaaaatgacggtatgggaatgagaaatacagggtctcacagcgttgaagatcggaaacagaacagggattttatcagattcgccacattcctcgtcaccagtatgttacgcggttggttccggccttgatcgtttacatgtaaatagagctcgaatataagatctcgacttatcgttgatatcgaatgtcagcagtaatcaggactcgactactggatatggtaccggctccatttggggtcattgtatccatccagatcgacggtgcatatgaaggtgcacttgtactttccccgtattcggtggcggaaaccgccgagagattcccagttggctgctaccatattcaaatgtcatatgatatagacatatcttacgttgaccaaggggattctacacgggtgttttgaattcgcacaagaaaatgcaagttccggggtgggccgacaggaaatgttgaattggaacaggtgtaatgtatgtaacgtgacagtaccatacatgatacctcggttatcagatcaatcagatagcaaacagcggattccaatgtccgagtatgtaatcatatcccatctgataacccaacgtgtctcgacgctctccacatgatgtgtgttctatttgcaaaggggcactgattgcaatcaaaatcccctgagtccaagcctcgaggccccgtctttacaaaataccaaatggatctcgctctatagactcccccactttccgaccagccggacctaccggtagagttatgtatcccgttggcccatcacagctctcatagcttacacgtcccttaccctcggtaaaccaatttcccaaccatccggtccaatgtggggatgccaggccgagatcaatcagtgggtcggattttgaacgagctagggatgttctagaaaaccagtgaaacagatcacccctggagctttcaggctgaaaggttcactgataggctggtcgattcaataataacataactgaagccactccctaccggaatcagctgattcttttgtgcatatgtagcccgtctcccgggcttttagtgttttcaccaagtctctattctatactagtggcactgcattcgcgatcttgcatcagtccattcgacattctttgtcacgtcgggtaggaaggctagggtttgcgtacaaagtacggagtactccgtactccgtagtcacgcgggttataaagcgtttgagttatagggggaagaaaccttagaagggctaacaggttccatctgataacttaattttaatgccgatggccggctggacttccgagagacctcctaatcgagtaactatcatcacagataggggtgtgtaccacgtcattattatacgatgttggtctgtttgaagacgaatgaaataatgataatcgataataacagcagaatcccaagaccgtacctacagtatatacggagtacgtcacgtcatcacgtcatctctagcatccaaacataaacagaaaaataataacagaaaagaaaacaaatcctccagcccaaccaaacactctaactattttcatcccgctggaccaaagccacaggcggaataaaatgatgtcttccccgaaccaaataataaatagtcgcagatccaatgatgccaacatacatcgccacgctccagttcattgtttcagccgtaacatccgtcgacagagggaaaaacgcaaagataaagatcggacacaggaacgccaacgctccaagattcactgccatgccaaatttcccaagtgaccaccggtggtgtgggagcggctcgccccgaatgcgttttaagaatacgcacccgatcgagatgatataagcggataaaagggatgtgatggtgagcgagatgacggcattcagggcgacctctgatccgatgttgatcatcgatagtagtactgtgataactagagataccatcacggagttgagggggatgttccagcctggtgtgacctggttatctgttaatactgctggacttacacctcttattaggatgtagaagacgtggcttacatatgcgaaaaaggacgaaaagggcagcccctcgtcccgggcaaacgaccagagctggcgcgatgccgtcgccacttcggtgattgtgctggcggtcagcgtcaccaccagcacggcagtcatggcgtttgtcgcggcgatgctacccgtggtgttgtagaatatctggataaatgggaatctggtgggggtatcgaggactctgtcgacctcgcctagggtgaagcacagtgtgatcaacataatgaaccccaacacgccattaacggcgacagaggacatcattgccttagggagtgtctctgatgcgtctttaatttcttcggcttttgaatgtcagcatgatataccatgtctgtgatcattcgtggagttcttccttacacatatgaaccgagcaatcataaccaagcatggatgttatggtagtggacaagccgaccattgttgccgtcccagggctatcccagccgcccccattgttaaacgtggtgaagactgcgtgggcattgttgcgtggtgcgagtacccacaacgggatgatgatagcgaacaaaccaacaacatgaatgatcaaaatcagtccttccacgaagggaagattcttggctaagaaggtgttgaataagattgagaatgtcgaaatggcaattactagcatggtgccatgccatcgctggaagttatagtctggctggtttaagacgatcaggccttgaatgattgtgccagcaaggtaggcgatggatacaatggcgcattgccaccccattgcagaaagccatcctgagataatatgatatgttagctggttagacttacacaggaactggctatgttacctgtgatatagctgaggtatttttgtcctctctttggtgcgaactccgacacccaatggtactgtccaccagcagtgggagccctatttatcaattgattagcggtgatttgtgaagaagcagcaagccgacagtcacctacatcgaggccatctcagcaatgctggcgtagacaagtgtaaaccccaatgtgacgctgatgaacccccatatcaagcccgcggtacccccatcggtcaagccagccgccaacaatctattaatggagtcagtagtctgcataattatcatatgcagggactcgcacatacgtcaagataacttcccatgtgcagatcaaagtgcatccaaatcctacaatagaaataaaccgaaagtttctctttgtgatgttaacacagccggaacaaaaagagtagagctacttactcgtagaacctgcactcgacctagagcattcatatcacgcttatccgccagcgtgcccatatactgaggctcaacaaggcctttctccgcgtactcctcgtcgtcaaggccagtcatcgtctgctgtgagtcaggtctggatctgctgatgactgtcatgattgcgggcgtggctgaacgattaaatgtaatctattgaagatgagacaagaaaattctccgtagaaatataggggattgcgagaataagaatgaaagtcaatatcttctggcaactcgacgccccgggggatctagggtacaaaagtgccaatgacaaaagcaccctctaatgaagcgaacaaaaatgaatgtaaccagaagaagaaggtattaggagaaagcccgaaggactagaatcatgacggccactgaatttcggggattgaagcgtggtattgacgtgggagcaaggcatggcctaaggaaaattctcgtgcaccatgtgggagagcacatctcctcggaacacccaagcagcgatccgaatgatacatcgttctttgccaaatggtgatgcatctaattcgatcgggaatgggactgttgaaactagtttttggagtttgctatcccttgtctgttgcccggaatggggctattgcgaccttgcatgccaggggttgaataatacctgtaatcttggaagatattggggtttggactgactgtcggggttgtaatgccactctaaaaacttctaatacttctatatatctctatcactgttgtatataaaccataacttgtttgaagaacacacttaccgaaattgtagccgatacaaagtacgaaatataaacaaacctaaccccttcggtaccgctgcccgacacatttctgatgtatcatctgcgctagccatctagacctattaatccctgtcgcacgtccctcattgcttatcccccagacaattccgccacactccatgcctagctcgaaccaaataacgggtggatgcatgaacccctcgctttatttgcccaagagaaaaccgcatggcctatcggatcacaacctcctaaagacccacagcctaatcccgaaggggcgcacgatgatcgacaaccctacagcggaccgccgtgccctaaacgcatgttcgcagtacggataactccgtactacatcgaagttcgacgtgagggagagaagtaaaatcaccattccaactgaccttcgcttaaaccaaaaatgataattgccaccatttatatcctataacgaaagaaagggataaaccagccataaggctttcggatacacctacagcatccgcccacatcgagcgaatcccaccagccctatttacgtacatgcctgaactcgatagtctatcttttttatcggatatcggcatatgacctacgaaggcagaacaatcataatcccaagtgagtgggagaaatggaacctagcttaacctttattgcctcgccttgacgcccgcatacctcctgcttgtgcttttctatacaacgtatacaagcgtctcaaatcgaaccccttcttccgcagtaatttacatcccgccattcagtgcacatggctcccggatctgacagcctttcacagtcgcttctgtgtctgtgttgatcagcgaatcccatatatacattccacatactatcaccacagtatatccttccctccacatgacatagatcataaccacgagaagggtacttttgagattatatcgtttgcggcggctcctgcttcctcccctgccatgggcccatatgtgccgccaggccagtcgccacccttcgaggtcgtcgatgacttacatcatggcgcatgggtgataattaccgccgcgctgggactggtcgtatctctcgcatgtttcttgattcggctatatgtgcggctcatgctgattccgccgtttgcgcgcgacgattggattttgttgggtgctacagtgagttagggcttgacaagtcgagtcaagtttggggtgggagaattatctgagcacgtaccctgctgacatattatttttacttgttgtataggctaccgctgtggtacaatcaagtctcatcctttatgcgtgctcgcgcgggttcgggacttctatatcgttattgaaggatggtcgactcgatcagatccaggcagtaagttgtttgaattctactacttcaatggacctaaactgagcagctacgaagttaattgcagcaagcgatatcatcgcgctgataataatttacctctccaaatgctgtgtcgtggctatctacctccgcctcacgcctcagaaaccacataaccgcgcatcctgggcgacattagctctgtgcactgcctgggttatccctgctatattcatcgtcctagttaactgtgagctaaacacaccttggcggagtgatggtgggcaatgcaacgacttggtacgtaaaccccatgatataccacgcatcagctccccgaagccgtttctcacctcgcaacaatagtacatacgatggcaattcatcgcagcagtcgatgttataactgagctccttctcttcatcttagccgtggtcctcctaaaaggcctatttatgtccgttcgccgcaaactagccgtcggcttcgcatttatattccgctttccgtgagtaatctacattcaccccatcctcaacctcaaatccaagactaaccgcctaaatcaagcctcataatattctccttaatccacatctcaaccctccacacggccctaaagagcaaagatacaaccctcgccgccgtcaacccaacagtctggatgcaagtcgagctccagtacgccctagtcgcatgcagcgtattctgtctgcgacccttcatggcagccgttagcactaactacggtacggcgggtgactcaacgctggaaggtagcgcgtcgagatcaaacggaacaagagaaggctcgaagaccgggtctgggtcgggctcgaatccaaataccgcttcgaggtctgtgtcacattctcgcatgcagaggaaaagagttggtacagggtcaagactgccaccggttcctccggccgttagttctcaatcgcaacagtcagagaatcatggccctggtcagggcgctccgttgtgtcttaataccagtacccatgcgcacagagcgcttggaaataatacaagagatgggtatagtggcagctcagatacagtttgcccaccagtgcgtcggtcaatgttcccgctcagcgcgccgcgcaagaagttgagctttcagatgctggataaagggaagaatgggataagggctgggtctgggggtttgtttacggatgagtcggatttgattgagcttatgccgaggtcgcatactcggcatgcgagcgatgcgactgagctagaggatgaggagggggcggataagatggttattcataaggagattcggtattcgattcaatatgaggatgaggatgaggctgagttaaggaggcgggaggatttgaagattaattctgttgatgttactgcttatgtataattatatctctatattatgccttcttgtaggatgtgtggatgtgggatattaaagggaagttgtacacaaagtttcaatattataacgcttcagttgttggtcgcttgaaaggatgggcttcagtgctcctaaaaagaaaagtgttagctcatgaagatagtataaacacagctggccgcaaacgtacagcacatagtcgtccagactgatatgatctggctcagaaaagatgagatagaggtacttcaaagtttcggcaagccaaaaactctccattttgtcctcatgtttcggtttcaaatgacgcacatcgttaatagacgaatgaccaaatttagttcgggtcgccttgtcgatattcttgaacatgcgccacgcggagtcttgaagagtcttatctccagtaatccggtacatgacgaatagagactcaagagcttcaggtctggatgaggcgtatgttagtgggctgcactgggaggaatgggataaattcgtacctgagtttatacgatgcgtctcggacactagtcacaccgggtggcagacgctcaacctcgatctggacctccgctttttcgcggtcctcctcggtatcgatagagtgcgatatgacatccgacatccactgctcttcatcccacggacattcatcaatgtgctggcaaggactgactctgaaaacctccggcataattcctgaaggcataacatcatatgcccagacgcagccgtcggtaagtccccgagcaacatacatatcctccggtcgattgaaaaccttagctccaatagccacggtgccacccatgaagcacttgaggtggtcaggcgcgtactggaaggtcttcgagtcaccccgtagtgcgacgacgttagccgtaaagagaaagtgttggtcctcatcctgggtcattcctctgaacagcagattctcgttgaatgtttcaatggccttttcgtacattcggtgatatttgtctgtctgtccacctaggagaatatgttccttgggcaagtattcgtacgcggaatcggcacatccaccgatagtgaattcggagtcgtcgaatgtcattaggtcggtgttaatccaggtcggccacatgccaggcatccgggtcttgtcttgtccgatttcgagctcgttcatgatccgctgcacggcatcgtagtacttgggatcaccggtcaattgggtcaggcgagtgaactccatcgtcaaggagcccatttccgctaagcttgtgcgtgatgatggtgtaatttctttgccttgggcggatctagatattgtcagtcacaaattctccttgcgtattattttctatttgggcataccttatccattcccaacgcacttggggcatgcgattatgcgtatcaaacgcattgaagatcatctcgcctagttcgacagcctttctcagcaggataggatgtttgccctcggtcagatcatgagcagcaataaagccacccatatagcgaatgatgatctcaaagacaggcacctgcctgctcttggtcgttgtaaagtcgatttcctccagagcttccagagccagctggagctcatcgtccagtcccataatcaccagcgcatctagcgaatcaacaagcgtggcaccccatccattaaaggtatcctggtaccctccagtgcgaggtttcacctcgtctcgcatccacgcataatccttatatccattccatgaatgaagaaacgcctccttcacagcatcccgcttcttgagtctggccttgcgctcaccgtgggtttcttcagggaagtcatgctgtatgcggggaattttcgctgaacttgttggtagcggtatgtactctgtaacagggaatcgctcggtgactttatctagacggatagcatcatgccgaatagtgctgtcttttctggagattggctttgctagacgacctcggcatgtttttgtactagggagccagaagaggaaaacgtatgtcgcgacaatcagaaacaacgctgttgacaaaggtcgatttttgcgcttgttgtacataataaatgaatggaatagggagatttcaaaataacccaagagacaacaaaggaatagtcataggaagcctagagaaggagtggaatgatgtacaagtcaagtcaagtagggaccagtagcaaatgccggcatgtctcagtgaacaagatcctgatacataattagagcaaacaaaggaggaaacatattttacaaaaggtggcacgtcatggattgtgagaggtctctagggaatcagacacggtttggagctccattgatcgtccctggtggcttttggaagttaatgcgaggtatgatcttggagagcatcgaatgatcattggcgcaattcgagaatgtcacccccttcacacctggccacgcaacaagggaagactgcagggtccaatctgtagagttattaatagagtaatatcaatggtcaagtctagactggtgagaaaagcgccaagacggtttttacgtctctctgctcagcgccaccaaccccaccgcggcccctgactgtccctgatagagtagttaggtaagggttgatcttgacgattttcagactggaagatcggacaataacacattgtgggtctgaaagctgtgctttggtatgcatatgtaccctgcctactggggcttcctatctcagctgtcgccacttttagggcactcagagtcaggttcaagtaaagttcaattagggcaggtagcccggggtcgtgaattagattacataatttattcattcataaccagccatcacgtgatgaaccagtgaggtgctcactaaaccctcaccctcaccataattacccaacggagtactttgtttattttgcgataattcgttgattgccctcacttctcaccatactctgaccacccatatggacgggactcaaggcccaaaaggcggagcactccagagtttataccttccctatttgtcgtttccttttcttcacgcttcaaccgactttccccctcaagtcccgcaagaatagcgtctctaaaaactgatggcttcgcaggcccagatctttctcttcctgaagccgtttctcgtaccataccttccttatattctatcccaaacagtcttccagatggatacgtcgtcaaccactcccgtttcgagttgctgcgcgcctgtgccaaaaatcttatcgagtcccttcagtcaaggtcagaaaaccagtggcttgtcattatcggcttatcccgatcagatatacacaaaaactcgatgaagaccacagttgtttggggggatgggttataggtttacatgggaaggacatgctgggctcatcaagatagtcccctccttcgagcgcaattcggtcgtggatgggcccaccagggtactggatctcgacttctaggcgagaagggcattctgaaagtcgacatggtgactttctcccttgttctaagggatagtacttttgtgtcttggtagatccggtatgagattgagcggtatgtcacttggctgtgtaggacctgtaagaataatatgccgaccttcggttcttgacgaggaagaaatggaaaaacgcactatcggaagcttcagtaccgtgtctagtggcttggacatgacttggatctctaatggtacccgccaggcaattccaagaacgtgccagataagaccacagatttgtgtcgacaaccagcagaaagtgggtagctaccacgacatacaagctgaccagggattccttcagccatctcgccgccctcccggctgaccaacactcaccgttgagatggggctttcagaatcgttatctcagctcagatgaaatgccctatagtggctatctaactcttccggtgaggttcgaatcgtcttgattatctctatgttaaaaaaaaagataagagtttccattgaaaaatggtaactagcactaccgaatagtccacgccccctcgagagaaggcatacattcaaaccctataccaatagatccgaagatccctcggctaatccaacagcaagtagtatcgcagtaagcgtactgtgcacgaggtcgaggtttccactggtagcatgtctggtacagtttcccatttattacagtgtatgatagaccaccggcataaggggagggagacattgtccttaccgcgcaggattttctagatttcaccagtgatctgatttaatattgcggtggtttgctttttgggagccctggatatattcgctatacttctccataccccttttttcgtttcattaccaattgaatctgtcacacgacaggaaaatgaatgcataatatactttgctttcagaaaattctctagattctgcgcagacgtatattattaggcttctaataccttgcaatatcataataaaaaaagaataataaaaggattcggttcatccgaggaggttgaaatatgtacactagatgtttgctttgtttgcacttcaatgctatcatgcaggctttcatctacaggctgctccgtacttgattctccataacaacctcgtatacatataaattgtccaaaggtaccagtttattcctattttcaatgtttatactaatcaatatatagattgaactcccgtcctgtttaggaatcatcttttggcattcctctggcactggacttgatcatcattgctattgatcgatctctatatctatattgcatggtcgctacctgctacagattcccaaatcaatccttcaacaggacttaagactatctgggaacctatcgccgcatcaatttcccaattgatatccctcagctcaacactgctgtggccattagtcccatctcttcctctgcacctgcccggaaaacaaacataaaaatgcctatcacagggtaaatatactccatatccaatagaaacacgcaaaactaacaccccaaagcgtctacttcatcccctcaaacccaaacgcctcaacagccctccaaataataacagagcgtctgcgcgccgccttcccaaatgaagaactaatcccaatcggccgctggggcctagagcaaaagctcctacgcgacaccccaggtctactcccctcttcaaactcaaacaagaaaccctcaaacccacgctacatgcaattcctctccttaacccactacccaactcacggcttcatctacacctcggagcccgagaagcccatcccagcaccaaaccaaaatcaaacccaaggcgcgcctggccccgtaaatgccatcgcgccagaccactccgcctccccgccaatgatcatgacgactgtccccccttcctcatacggaaccctcttccagcacttcacctacgcttgtcagccattctggagccatcggctcaccctcactgtcccgaacgggatcgtctacgaggttggtgacttccgcgtgcgtcttggtgatgtccggcagacgttcccgacggcgcgagtgcgtggtaccgttgttgagattgagtggcgtggtccgtcggttgtagaggccattcccgtagatcgggaggatgggtcatttggtgctggtgttgatgctgggggtgagggtgatgtggacgttgaaactgccgggatcaacctcgatagctctgcaattgaggagtccgacatcgatgccgagtatgcggcgactgcgtcgttgattcgggagttttgggggagattgggtgttgaggctcgggaggcgattcttattccgaacgttgggatggaggttaaggatcggctgaggaggtggaagaaggctgagtcgtctggcattgacgctaggattgatagtagagttgatggggctagctctgtaattggcgagcgtgccgaggaagatcctaatccgtggtctggggcggatgttgcgaggcagtttatggaggttttgagatttaatcgatagctgggtgtttatggtggcggttggtatgatggttatttcttatacgcttgctactgtgttttgtggacattggctggttggaacaagtctcgcactataggacatagggatggagccatcattcctatattatgaagactcgacccaaagtaccgccagtccattccgtctgcatttcaaagcgcacgcttgatcgtaaatcatccaagatgtatagcctagtgagcatagactacaggaaatcggtattggaaaattgaaatgtaagagaaacactctcgttaaaaaccgcgacgtcagctaacatggaaaaaggcgcacggtgaaatgtgtcgcttatttttgcatcatgagctgaacgaactcgttgtctgtatggagagggagaggttagcatttgggcaggcaagtgccggtaggctccaagattgtttccaaacatacagtcgattcggccatcaccatcctggtccgcctcgcggatcatctcgtccacctcgtcgtcagtcagcttctcgccgatggaggtcatgacgtggcgaagctcggcagcggaaatgaacccgttgttatcacgatcgaagaccttgaatgcctcgcgaatctcctcctcggaatcggtgtccttcatcttacgagccatcatagtgaggaattctaccgcacgtcagtagccgtctctcgtttataccaggaggttatggtcaaataccggggaagtcaatagtgccgttgttgtcggcgtcaacctcgttgatcatatcctgcaactcagactcggaggggttctggcccagcgagcgcatgacggtgccaagctccttggtggtgatttgtcctattagtaggattgtatgttagaatacttttctcgtgaaattcgatcgcagaggacactgagctgtcgggcgcgaccacacgtaccatcgccatccttgtcctatttcgcaatcaaaccaactccggtcagcatattttcgactatcaagtcttcaatctgtatggtgagtcactcacaaacagggagaaggcctccttgtactcagacacttgctcttcggtgagggaatcagcctggagaatgcgatggtcagtgaagttcaaatgaaatgccccgcaatgtgggggttgaattttcgacaacacaactgagaagttaggggatcagggacataccatgatgaatgtagatggaaaatacaacaaagtaaggaggggtcaagtgaagaagagggttaaggggaatagccttacaagagttaccaaaatagcgtgcctgaggtgcccagtcagcgtcgtttcatcttagggcggtgggacccctctctggggctgaatgttgccacaattggaagttggaatgcatgttcaggtcatttttatatatattcttggcttatttcatatatctaaatatctgttgaaatactgtttatcatcgccttacttcctgtatgctcatgcggatgtaacggacagaaagcttgatcccggggttccagggctacgttgagcgggctaacagtactataccgaatcgacgtggaatggagccaaattgcttaggggggtcttggctattatttgtttggggatttctgtttatcctacttaatagagtgtaactgcggggtggatgtatagatctagaagtaaacactgcaagacgtcctatattaattgaataaagcgatgtgttcttcaactataagccttcgacaatgccctatttctacctatttaggctcaaaacccggggtttccatgtcactcaattgagcacgcgactcatagtaaagcgatttgcagtgattggcacaataacactcaagacctcagtgtcttttgatagcaaatatgtccaggtcaagctgtcttcacagtttacccagccataccaaaattaccacaactccacgtggacaaaaccaagggttacatggtgaataccgggcatacgtgaccccttccgacatgtggagagctcctatcattcacttccggctatatcgagaccccaatctccctttgatcccagtctatcaccccccagctgatcatgattccataacctcaccaaattaataaactgacataacccgatcctacgaacgccctcacaatgtggcgggatcgaaccaacctgtatgcatccccatgtaccctaccctacccaagcgcaacccgtcatcgccggacagagccaaaaaaaaagaaaagaaacaccacccataaaactcagcctataaagcataccagcaactaacactccacctccaaatccagctacctctcctaccgccaatccctaatccaccacccagctaaaaagccacacttcacaccaaccaatggcttctccgacacaccctcgcacccggaggaaaataggcgcctaatatccgaaacagacgaagatggcgacatggtcattgaaatggacctcttaccgccgcgctgggtcgacgtgcaggaagaggtctccgagcagttagccgagattgcccagaactccgcccagctggacaagctgcaccagaaacacctgctccccggcttcggcgacgaggacctgcgcaagcaagacgagggcgttattgagcgcttgacgcaggatgtcacgcgctcctttcatgattgccagcgcgctatcatgcgcatcgagactatggtcggcgagtctaaggcgcatgggggtgttacgagtggggaagagactatggcgaagaatattcagatttcacttgctgcgagggtgcaggaggctagtgctaggtttaggaagaagcagagtacttatttgcggagtatgagacccttctttctttttgtgttcttgttcttgttctcttcccggtgaaggccgaatcggttggttccatgtgctgatttgtctctgtccagaattgcgagatctcgagggtatcgcgacaccgttcgatggcacggctacgcagacccagaacccatacacggatccgtcgatgatggagtcagatgccgacagatccttttcgcagaacatgttacagcagacttcacaacggcagaccggtcagaatgatgctgctatcgcacagcgggagcgcgagatcaatgatattgcaaaggggattatcgagctttcggatattttccgtgaactgcagagcatgattatcgaccagggaaccatgctagaccgtatagattacaacgtcgagcgaatgggtaccgaggttaaggctgcggataaggagcttaaagtggtatgttccttctttactagcaacttccccccccagagcgaggaactgacttatataggctacgagttatcaacaacgaaccactaagcgtaaggtcatgctattactcctgttgatcgtcgtgggaatgataattgtactggttgtgaaaccaaaggggaagtcttccccgccgccgcctccggaggatgaatcttcgaacaatatccgctccgtgttggcttaccgggggcgaagacatcagttgtcgaaccgcttcgcgcgagatcgatggatggatccggatatattccgatgatgtttctttttttaatagcattggttcatagttaatgtgaccagaagagcagacgttccctttgcatattggtagttgctgtacaacatagctgcttagttttagagtaaataggcaatggatatggagatgctagatctcacgcaagacacttacttgcactgggaaaattcgaaaattggactacagacctgtagatcaatgccaggttacattatacatttaattacttcatacacgagataaatgatatcgaacataagccgattgaatagaaaagaaatgaataaatcacacgaaacggcgcgatgcacataaattaccagggtaacatatggcctcgatcataatacttcaagctcactcaccgattaccctgggtcgcaagcagatcagctacatcggaatctagatcgccggctgcaaaagccgcatagtcctcctcaccatgggagatcttgcgcctctttgcatggacatcggcagcgacatcgaagtcattgccatggttcggagaaatggtagtgggttggtcggagacggcagtcccgttgcctgactgctgcatgttggcggtgttcgtagggttccattctgagacatcgtcgtctgcctcttcggtaaaagggccgcggcgaagctgctgctttcctggttgtggggatcccactggcgtaatagcctccaccgggggaggtgtcaaagcttcgactgttgggcgggcgggtgcatcatcgtgtccgttgtattcaccagggtttgtggaggactcttcactgggcagaccgcgcataatcgcatcttcgacctcgcgcttcttggtatcggccgaggctttcttctgtgaaagctcggcgctaatggcctcttctttcgatagctctgcacgattggtctgcaggatcttctcgagcccatcgatcaaggcgtggcgcgacttgattacttcagagagagagttttctgcgttggcgagtgtcttcaagagtgaacttagacgcgcagcgtgaacgggcagtgtagccttaggagttttggggtcatgaagcttgtcgaattccgaagtagcggttgctgcggaattgtgggagttgatgacagccttgttgagagcaacctgcaacgggttgagaggctgcagttcggacggggaggatcccgaagaagtgtccttgaagaaagatcctccgagggtttgcttcttgtttgtaggacgagctttgtcgagttctgcaacatgatcagtttagatagtgcatcctcgtgtctattgattcgacctaccgtctatgcgagcttccactgcatccaaaataaccccgtcaaatacattgcgttgtctccagacctccacgactcggcggatcctttgctggtattcattcgaggagcccttgtaagcagctgacgtagcatcgacgatgatctattgttctgttagtttgagttgcgatcgtggactggcagggagacgaaccggagatagcgcaatgaggaaatcattttttccgcgtactttagattgctgggccacctctatagatatgattagcaagcggagtgcggctcatgtgtggaggacatgttgtaccattggctaggtagatcaggttgagtcgcttgggaggcggcgagtcgcggatcttttgaagccagatctgtccagtccgttcagcatggcgtctagagttacagacaaaagaattagcaagtctctttgaggctggaacaagtgtctgtacctgtggaacatgacccattgcgcaacagtaacgatgctctcctgcgtgtcattcagagccgatagctttgctttgacagcgtcatcagtgaaagccatgatgacaaaaatagtaagcacttgttttattgaacagcaagcttttgagaagtgaaattatcagatctgaagtgcaagtcgcaatcgctgttagagacaaatagacaacgagtagaaattggagaccactggagagatttggaaccgcgttgagtggcaatcaagtaaagccaccgaaataaagtcaaaggaatatcaaacgaaaatctgaactctcaacctttctcatcacaagtgaagttgacatcaagtggtttgtaccccaagcttgagacatggataagcttaccgccccggatccggcagaacaacgggcctccgagcccgcccaggccacacctgtcaacactacttcctataactatctacttcctggtcctttgatttcttctccttacgaccatcttcttgattcaaacgtctttattgagtcatacaacagtcaaatacaatccattcccagcatggctgaccgtttcccttccctagaggacttctctgagggtatgctcaacccgccttacttgctctccttacaccggagctaacatgacccgcatttaggtcaaaccgaagtagccgatatccaagccaccaccgatgacgatttccttgctcgcgagcgtgctgtgctcggtgaagacgccgagcaattcgctacttctcaagaccacgttgccgacgggaatgtaggcgcgggggatgatgacctgctcggtgcaggtgacgaacccgttgaggagattggccaatttgaatcagcattcccctctgtagcgacgcagaacctgaatgaggtacgaattggctattggatacatggtggtggacatgcagtatgctgaccaggggttacatctatgcagcgcgttgctcccggcggcacaatcactggctccggctcacccttcccccgtaccggatatcagagcgcacaggaacccgaagatgagggagatgccgttcggtgagtccaatctcaaactctggatgatggggcgcattgcctttgcgatctgcatccatcctgtctcggcccggatcccccaagctaacttctgtctttgaattctcagcgaatggcgcgaaaagcgtgattctgagattgcccgccgtgccgaggtctccgccgagaagaaggacagtactgtcaaaaaggcacaggaggatattgacgacttctacgtttcctacaacaataaggccgataagaaccgctcccacgcccgcgccgaggccgaacagttcctcgccaaccgggaggacacctccgccggaggcaccagctgggagcgcattgctaagctggttgatgtatcgggcaagggctccgcgggcggtgccagcggctccggaaaggagcgtttccgtgaattgttgatcgacctccgaaaagaccaggaggctcctggctccagcggaatctaggtggtttgctttggcgtgtgggggatagaagattcgggggtccggggttaagacatggttcacaagtttcccacatttactcatctgatatggctttttctacatccccctccccgcattatttggtagccttgccgtgatttgggcgctacgtctcttattctctttttattttattttactccacgcagcgaagtctctaggggggtttgtaaattagtatctcgctgaaattgatagcatcgttaataccacagatttcattctccggccgattcgtgccgagtagatatctttattacacgcttaatagtacaatacggatgtacaccaatcatggaaatagttggacaaccagttctcggatcaagagaaataaatgcatacttaattcatatcatcgtcgcttttgaagcatccttagtcaagctcggtaatatcaccaccgggctcaccaacttcctgctttccctcttcttccaactccttcagtttcttctggccctctgctgtcgtggcgtcgacgattccttcctccaagctgagcatgccgccattgcccaattgctccacaacgacctctgcctcctcgacagacatcttgccgagaaccttgttgacttcgtccaaggactcggttgccagtgccttttgcaggtcttcagggaaagcgtcgaagatcttgcgtacctcaatctcagttggatcttcgctattagcggcaggaatgttgatagtgatcttggtgttggggtcaacagcgtgcagctggatttgctctacgcccgcaggatcgttggatgctgagccatccttgctgagttcagcggagcgggatttgatacgagcgtaagtatcattgacatcattaaggaatagggtggatgcgcggtgatccttggtggtgatgctagaagttcatatgttagccattgaccggggaaaaaaaatagctaggaggttgatataccgagtgaagaacagctggatgccgtcacgaccgagcgagcggcagtattgcagaagtagaccttggtgcacgcactggcgagcataggcgtcttgacccttgagctgactgttgaatgcctcaacaagtagtccgtcggtctctttctcggcgacaatttcggggttcgctgagatgaactgaagacaggccttgtagtctccaggcttgagctgagcgaacttctttgcaagcggactaatctcgatatcggcaggatcatcatcgtcgccttcatcgtcagccttggcggcggagcttcccgcaccagggttcaggagctcaacagagctctcctttggtttggcagccgccttcttcttttcatcagccttggccacatgtgattggttgaaaccttcgtgtagctgatcactggtgatcttagcgccttcctccttctcaagttgcgcaagctttgcaaacaattccttttggagtccttgaatcttttctaagtgtccattcacaccctgaatgtatgccttgaagagattgtcaggcttagaatcaccaatttccttcttcacctgatccaccagtgagctcatcatctgggaaaatttgggctgttccggttcgtgtgtgtatactccctccggcggggtgggggcctggtcttcggcggggttgcttgcgaactccataattgttgtgaaaatgaactcatcaggggaagcagacgagtcctcatgcttcttgagagactcaagaagcttatcgatgcgtgacagcaatccatcattgataatgcgctcgtacttcagggttttgatttcatggcgacgttgctctcgttgctggtgaatctgggcctgctttgctcggatgaaagaacgtttatcgacattgggatgaacttcgacatccgaatcatctgacagctccaaggcgtcccatttgctataatcaagaaccatcttgtctgacagtgaatgtgtagagtaggtatgaggtggggtggtgggtgtattagcggcagaggaaataggtgagagacaatgtttctgatcttgacgtgaatagcaacaatttgaccaatatgttttcgaagtgatttattcttatgaaaatcaaaataaatgaagctctagcgcccgagcagatgaagtatccagagctctcgacgggcttctatgggcggtagataaaggcaaaatcacaagcggtcaaatagggcagaatcagccccgaaaaccgcttttccggtggccgtgggtgtccggcgaagctctagacacatccgttcatccatcgcacgttccaaggagctgaatgtgtgccatgtgatgtactcaacttgaacatattccgactagatatggcaggtcgacgtcttattcggtgacatcattgtaactctattccgtttcgatccaactccgatccaactccgagatgcgcggtgccaggctgccggtctctctggccttgggcgttagcccacggcaggctttgagaccatatagctcctttgcttgcgatctacttcccaaaacaagatcgtctcttatctcttccggagaccacaatgggttgaaccgtctcaattcaaccgcctcgggtacactccgggatggtgccaacccactattgcttcaaaatatcagcttcagatataccgcctctacatctcgcattgtctcacaagcacgctttctatgttcgacttctcaacttcgccaagcgaaaccacccgcaacctccatagagccaactactcggtcagctacagaaccgaaagaggaggaggacaaggggtttgaactatctgagcgagcagcgcaggcagcgcaggtcaacatgagcgctagactggccaaggaaggcgcagcgggaaagaagtccgggttttcagaaatctggcggcttttgaagatcgcgcgccccgaatccaaggccctcggttttgccttctttttcctcctaatctcctcgtcaatcacaatggcagttcccttctccattggtaaaattatggactctgcgaccaaaggtgtaaccgaaggaggtagcgaattgttcggcttgagtatgcccatgttttacaccgctctcggtggaatcctacttattggggctggtgcaaactatgggcgcatcatcattcttcgaattgttggcgagcgaattgttgccaggctacgctccaagcttttccgtcaaactttcgttcaggatgccgagttcttcgatgctaaccgggttggtgatctgatatcgcgccttagctccgacactatcattgttggcaagagtatcacgcagaacttgtccgatggtctacgagctgctgttagcggtgctgctgggttcagtctgatggcctatactagtgcaaagctgtccatgatcttgctcgtcttgcttcctccaatcggtctcggggctctcttttacggtcgagctatcaggaacctcagtcgtaaaattcaaaagaacttgggatcgttgactaagattgcggaagagcgtctgggcaatgtcaagactagtcagtcgtttgccggtgaagttatcgaagtccgccggtacaacaaacaagtccgcaagatcttcgagcttggtaaaaaagagtctttgattagtgcaaccttcttcagctcggtgggtcggcagtcttgattcttttgcgctttgcgactttgactgacttcttactagactggtttgatgggaaatatgaccattttgaccctgctatatgttggcagtgggatggttcagtcaggtgctatcagcattggagaattgacttcgtttttgatgtacactgcctatgcaggctccagcatgttcggtctctccagcttctattcggagctgatgaagggtgtgggtgcggcgagtcgactctttgagctgcaagatcgtcagcccacgatccacccaaccaagggtatgaaggttgaaaccgcgcgtggacccatccggtttgagcatgtcacgttctgctaccctacccgtcccgctgtgaagatcttccaagatttgaacttcgaaatccctcaaggaactaacgttgcgatcgttggaccatctggtggaggcaaatccactattgcgtcaattttgctccggttctatagccccaccaagggcagggtcttgatcaacgggaaagatatcatgggaatgaacgccaagtcccttcgcagaaagattggcgtggtttcccaggagcctgtacttttctctggaacaatcgccgacaacatctcctacggcatgcctcgagcaacacgctcagagatcattgctgctgcacgcaaggctaactgtcaattcatcagcgacttcgtaagtccacccagcagctattatttttatgatcctaggctaacctaatgcagcctgatggacttgatactcacgttggggctcgtggagctcagttatctggtggtcagaagcagcggattgccattgcgcgtgcccttatcaaggagcctgatattctaattctggatgaagccacttccgccctcgacgctgaatccgagaccctcgttaacagtgcgttggccgctctgcttagcggtaacaacactacaattagcattgcccatcgcctttccaccatcaagcgctccgacactatcattgtcctaggccccgacggcagggtcgccgagcaaggctcctacgagcagctcagttctcgcccggatggcgcctttacgaagcttatggaatggcaaatgagtggtggcgaaacaacgtcaccttcgggcaagccgactgaggccgatgagccctggaagctccagacggagtcagaacctgatctggaggaagatgatgtagaagaggtagaagagacagcctcttcgaaaaaggaataatcgtactccacacctcgttcactcctcctattcctacactacatctcactatgatgtctgctcattcttgtagatttcttttttctttgtcaaaatacatgttctcatctacactcacctgtcacggttctcacgtcctcccttctccacctacacattctccctgttagactttgcgatagatactatgtaattacagtgtacaaagatcaatattattgttcgaattctacttttttttcggttcggtttctgtcgcctctgttctggcatgtcatggaaaaaaaaaagaaaggttatactgaaggacatgtgtgtaccggataatgcctaacatcagaacttcgagatcgccgtccggagtccggtgcgggtccagcgacatatcttgcttagtaaccagtcatatgcggacgacctcgacagcgcattacagctccttgatatgagataatccccttttttgtacagaatcttttgcttatacataagaagtagtggttgaaatacagccatgaaccgcatacgtagtctcatcgcccgcccagcggcatatgagcgactacaggactccgccgcagacgacgccgatgagacaacatacacgcagcgacagcagcaatctcccttttcaagagtacattatggcatattcttcctcctcggggtgtctatgctgtgggcgtggtaagcggaacttaacagtctccgaacccggaggaaacaagccacatacatgtgtgttgggccgaccatgaagctaacgcagagcatgatctaggaacatgttccttgccgctgcaccatatttctacagccggtttcagtcggacgactggacaaggctacactatcaaccgtcgattcagtccatgtcaaccgtcaccaacctcggagccgcctttaccctagcaaagctacagaagaacgcgtcctatccacagcggataacgttttcgctgttgctgaactctgtggtcttcgctattttggccttttcggcagttgtcatgaccgattcctcgccgcgagcgtactttggtttcctgatggtgatggtgtgcgccgcgagtctagccactggtatcaaccagaatggcgtatttgcgtatgtctccgggtttgggagggatgaatatacccaggctatcatgagtggacagggtgttgctggtgtgctgccttgcattgttcagatcttctctgtgttggctgtgcccccgaaggaggatagcggccgagaccaagagcaagaccccagcatgcctcagacgagtgcgtcgacgtcggcgtttatttatttccttacgtctacgggtgtctcggccattgctttgctggccttcctctatcttttgaggcaacaaccttcttcaagacaaaagttgacaagagatgacgatgagtctattacggatgaccgtgaaaattccaagactgtcagcctctggactttgttcgtcaagctacggtttctggcgtttgctgttttcgtctgctttctggtctccatggtattcccagtttacacggcggaaatcaggtcagtcaacgatcctgctagttcacggatctacgatcctagtgtctttgttcccttggcatttttgctctggaacctaggcgacttgaccgggagaatgtgtgtggctattccaggagtgtcattgggacaacatcctcaggtggctgccatggtggccattgggcgtgtcattttcattcccatgtaccagctctgcaacatcaacggccaaggcgctgccgttaagagtgacattttctatttccttatacagttcttctttggtgcaacaaatgggtacctgggcacaagctgtatgatgggcgctagtcactgggttgttgccgatgaaaggccggctgctggtggatttatgagcatggttctcgtcggtggattggctgctggaagcttgttgagtttctctgtcgccagtggttgatttcggtgccgtataacttgtgttcatcttctagacacaaatatcacgaatgacgaaccatgaaaatacttctatcctttggtctcagcataagcatttgtttgctaggtgacccattgagcccttgagccctttaatgtagcccctgttttccgtttgataggagccctaagttgagacccaaggcgaagtttgccggctgtcgccttcatgttttcaatcactcttaaacacgccagtcatttcggactttaagcgatctcctaaaagcaatcactcaccatctcacatctcctagtcaactcctattacaagccgcttgtcgtctgatcttctgtttgcccgcgcgcttcctcggcgtcttgtccttcaccctctcttctcttctcttccctttttccctccacaccgttccctcttttgatatttgtctttcctttcgggtgtccatcagtaagagaaacatcctggatgtctttgattgtataacttacagtctctagttgttgttcatgatgattttcgtttcattggctatgggcggctggtgccatgccctagctgtcccttcattctggagtctactgagtggactccttgtcttggtgagtactgacatacaaaaccaggtatttaaggtgtggtgtgtctcatttcaatcaattatcacagtttttcatttactatgtgacctggatcatctacactctctgcttccactccctgagtggctaccctggacccaagctggctgccatcactcctttggttcatctcgtctgggacatccagggcaagcagcactcaaccgtgaagcgtctccatgacaagtacggagacgtggtccgcattgccccgaatgccctcgtttaccgtgctgcacccgcttggaaggacatctacggtcaccgcaagaagggacataaagtcttcatcaaggatcccgccttgtatgcacccactcccaacggtgtcaatgcaatcatcaccgccaatgaggacaaccactcccggatgcgccgtttgctgacccatgcgttttccaacaaagccctgcgcgagcaggaaggcatcctccagatgtacgccagcatgttcatagaaaagcttatgggtctcatgggcagtgctgaatcccaggacattgacatcacctgctggttcaacttcaccaccttcgacctgattggcgacctcgcatttggagaacccttcggctgcttgtcaaccagcgaataccactggtgggttcggattattctggatgctgtcaaggcaagtgcctacctcaaggtgttttggttctaccctttcctcattcccttggtccgcgtcctggttcccaagcaccttcttgagaagcgccaagccagcttcgacctgagcgttgagaaggtccgtcgtcgtcttgccctaggtgccactcgccccgacttcacttcatacatcctcaagcataccaaggatggaaagggaatgtcgcctgaggagatggatgcaaactcggcggtctttgttctggccggcagtgagactacggctgccctgctttcaggtgtgacatactaccttctgcgctgccgtgacaagtacgagcgtttggtcaaggaaattcgtggtgcttttgacaaagacggtgacatcaagctatctaccctcgtggatctcccgtacctgaacgctgtcctgactgaggcaatgcgcatctacccgcctattccttcgatgcttccgcgaattgttcccgaaggaggcgccatgattaacaagaaatatgtccctggaaatgtgagtacagtatgccggtaccggtgtaatgtggtgttttgtggaaatgtactaagtgcatggacacaacacaacaaatccaatttcttagatttctcaatactaacaacaagtaaatacaaacaggtctccgtctctatgtcgctttactccgccttccatgcagctgagcacttcaagaatcccgaggcattcgtcccagagcgctggttgaacgagtctgacgagtacgccaacgacaagaaggaagccttccagccctactcctacggtccacgcaactgtctcggtcaacagtaagcatccattcccttactatctactcactccatccgtgttttcccctcagtcgtgcctaacagtgtttgctaacattttaactacagcctcgcgaacgccgaaatgcgcctgctgctcgccaagctcttgtggaacttcgacctggagcttctttctaagtctcttgactggactgaccagaagaccttcgcgctctggagccgccccgagttgatggtcaagctcttccgtgccggtgctggttctgcactctaaattcacgaattcatgagacaattacgagatctccttttaacagctcatcctgttgtgttgttgtctcaaccgtgaaaaagcattgggccgaaaagcgtttgtcgaaaatctagcaatggcgttttcttcttttgtctcggggttgcggctgggctgtttgtttcgtcctccctgggattgtcagtacataacatatgtacctagtcatctgtgggctactcccccggtacaaaagattggaggcatttgaaagtgggctttcgctagaatagaaaaatcaaaatcaaaatacagtcttctgtcatggtatggtcacttggccggaaaccgctagacagtttattatggctgttcaaaaatcgtatttgattattctcacttttgaggcaaagcaatatattttgcatgcaatatagaatatgaagatattgtatatgcaaatcccttgtactggtgaggcaatgcgccttttatctaaataactagccccaagcccacaatatgtgaacaaatgataactcctaaccatgcaaattacaaagtccatgtaactcccaggcaatgctttttcgtatactaaggaatcatcagaaaaagtcctgttcactcagccatcgcgagtccatcgcgtaggccaccaaatccgcagcgcaacacatgtcttcgtgtccatgctccaagtcgaggagctcaaggacggcttttagtctgccctctagtgcttgcttcagccgcgagatactagcttgcacgtctttggactgtctttccttgagggacccggccatgttttggtctttccctttggatgtctccggttttggtgtcattctgttgggcgaacaaggcgcaagagcctttcgctgtggctgtacaaacaatgcttcaggcttgcgatttttgaaaagactctgaagcaggaagagtagccacaccaagttggtgcgtggagagtattctgcccagatgccaggaatatccgctaccttttctgtttctatagggcaaccagtatagagtgttgcgcgcatactgaattttaagttagcaagttggtaaagaaagcaaatcagcggagatagggtaacatactatcggtaggtgtttcgttgcataatctcgtcttcatcttggccaatagcatcgaacaattgcttcttgtccagatcagatgatgcaacctcagtgagaccagcggggtcatcggtcaggagtagatccgctcgagagagcgagtagtcaataatggtagtctcaagggagctgattccaaacccactgcaggatgactgtcgtgcaacatcaaattctgtggggggatccaagcaaccatcttcccgcgtagaacgtatacaaacatttcctaaatgaagatctcgatgttcgaacatagcatactcctctgcccgggccagagccatggcaactccccagaagatatcatagatttggaaaatcgatgaccaagcgaacttctcgagttcacatcccgcatcgtccatctccacgattgcccatagctgcgtatccggataagctcttttgttggatggattgggatttaggcagtcatctttggttttcttatagtggtcccatgcattttggaacgactctgggaaacgaccttgaacaacatgaatctctctaaagcgagcaaagccagggatcgggtccaaatatttgagcattttgacctcggaaacaatctcgtcgatggtggtgaattttttggatcctggaccgctctttgctcgcagaggcacgaccttgaagactccatcgccatatgatttcagtttagccaactttgacttggacaccaccggcctgcaagcttcttcccgcaggtgaagcttgtaaacttcaccgtaggatccctctgcgagttttgcgacgtggaacatgttcgctgatcgtgaggcccacgagctgaacttctgaatgccttgggcggcaatcggagatagtgcctcattcagaattgggctaacataatcactggccttgctgtcgtgaacaactccagatgaccgtcttggtgcaggaatcttttttctttccgctcttcttctggaggatgtacttggcttttctcgatcctcgcttgtggactctggcatcatagctggggaatctgggatggcttgaggaagtattcctggattcttcgggcatatcctgacctccaccatcgtttcgcatttcttcggttctagcttcgactgctccgagaaggattcgaaggaggatcgcggtgtcagggtgtccgaggtatcctctatcgtagacggactcgattcacccaagggaatttccgtcaactcttgctcttgctcgctctcagttttgataggctttgtgtaattgtcttgttgaagggttgagtcgtcatcgattgccacttgggctagtttcgcttggaggctttccacggggtcgagatattgggtcttggatctggtatctctagcagggcttccatgatcaaatactgccctaggggcattggctcttcgtttcccgtacactctgcgctgagctacggatttgggtttggattgtttgggttccattggtgtcgcgtgactcgagactggcgagtgtgaccgggttgacattgtcgaggaatatttatacactcagtatactagccctgatatgtggaatatccgtgtaagggggttaggatgattctgttcgacaggaagcggtcgaaagagacgatttgggccagaagtgatggatcgtgttgatgtttaacctaatcgggattagcgtatggttactgcggtgaaaacattctgcccttggcctctgggcttttattgtactgttttacggagtatacggggaagggagtgcttcaattgatgttgctttggtttacagactattgagtgcaagaaagctttatgtgattgtgtttgaacagaaatagttggcttatgttcagtaacaaggcagaagtccggggaaagggtatacttctccaaccctgcctcattttatacaagggataaaattcttattttcatttcattgctctgtccctgagacctgcactttctctcggagtcttctttcccttacatcgtacatgaaacgaacgtgggactcatactttaagatctgcatccccgtggctgtttctgtacgctggctgcactgcgtatagtatgacaccttcagaaacatcccgtgtttcccccccctttctccagattccgggcaacacggtcataagagagccgatagtccaagagtctagatacgtgcagcccgaataccgtggacggtgaatggcccaatatcatccacagtggacatgacgccggggctgaccggaagtggtccctgagaagtcacactgtgacgtaccgcccttgtagtatccggtcgaaggaatatagcataaacgcgaaaaagaaacccaaaaaaagataagaatacttagaatgatacatccaattaaaaacgaactgaatagtgaaacaaaataagcttaatgaagaaaacaataacagaaaagtccttaagtgacccggaagcacgcgcctcgggtgctttgccttttttttctgctttttcgttttccgcctcccgccctccctctctcttctctttgagacttcatccaatgtccttctaacactttttaatcctttctcgatgcttgggcatggcgttcaacttcaactggtcgcctttgatggcggacgcgagtttttatactcgcgcccaagatctgcttactgccgcacttaacaaatcgccaaaaccccccataattgtcgatgatattcacgtcaccgagttgaacttgggatccatcccccccgagctcgagattttggaaattggggatttggccgaagaccgctttcgaggcatcttcaaaatgtcctatactggtgatgcctttctcaccttgaagacccgcgttcaggcgaatccgctcaataccttcctgctcacacgaccaacttttggctcgccagtacctcttgctgcagcgtaagtctatggtcccacttatctcttatttgactccaatctattagatgtgtttgctgactgtcgtgattttagtaccccgctcaccatacctctacaaatcaccctctccgacttcaaactttctggattcgtcatactcgttttctcaaaacaaaaaggaattacagtcgtgttccgcaatgatccccttgagtcactcaaggtttcgtcgaccttcgattcgatcccatttgtgcgcgacttcctacaaaaagaaatcgaagcccagcttcggatattgttcatggacgagcttccagccatcattcatcgactatcgctccgtatatgggttccggaatatcgcacaggggaggaaatgaacgacgagaccgataacacagccaagtcaagaagcgaaggccctggccaagatcctctggctagcccgccacaggatcccgtcgactcactcggaaatgcattgaatgaatccgaaatcgcatcgctctctctagattcatcggtcgagacccactcgcttttctcacaaaagaacctccttcgcttggccgctctgacagattcgcaacgtacactgtccttgttcactccttcgatcgaggaagtggtgtaccgagcatggacttctccaatcgatcccagcgaattttcctcgagcgtgatctcaccactgagcccgaccctttcacgaacgcattcccaaatgggaagcatgtcttcccttcatgaaaccgccagcactgtctccatgcaaagtcgaccctctatgtccggccattcattcagtactagtacctatggtctgagtctaggcgctggacgtcattccaaagctcacgcccggaagcgcaagaagcgtgttgtggacctgcgccgccccaagacaactgatgacgctatgagcgtcggcgatgagaacgtcatgaccgagtcctccagaacgccttctatcgcctctgcgcctctgcccgttgtaaatgagccgtcagatgacccagtcacaccacctctatcacccgaagccgactcccatttgcccattatcccagaaaggcatttgtccaacttctcccgccccacacgtcgggatggagacttatcatactcccatgagactatccgtggacccaaagcagaggacgtgcatgtcacccctcatgctactgtgcgtggctatcccaatgagaaggccacaccggggccgtctagcaatcaacggaccccgttgcctacgacattcaaagacgagaatgccaacaacgaaagcgtcgattccgtcctggttgagagactcgccggtgaaatcgctcgtcgaatgcgcgaggacaagcttatgacaaatgcatgcagcggcttctggagtcgccagcgtgaagacagccctcccccagcgtacggccactgagcactcacctccatatatcttctacactcgagcaaccctcgagcatgaccgttacgatttccttacttctccttattttgtcttaccgtttcttggttgttcttttgttcttccttttttggggcttaactgatatttctttggagcgggagtgtacaaaattgggtcctgtcatggtacagctggcgtcgagttctgttcggggtttcatttttacatgataccacactcattagccattgtttttttatgtatttcttatttttaggcaggtcatggggtacctagagcagatgagatggatattgggggtctaaattatatgaaatatgtttgttcccaattgctccaatcgctccaatcgcctaaatcgcctaaatacctccgatgcgatgcgggtaaaaaagctggagacagcgctagaccgggaggaacttagctccgcaccgggcaccgtgcaccggacatctctcgattccttcccactcctttcccttccatccatatcacaccaattccaatatggcgggcatgttcaagaacgtgtttggctcccatgaggctaagcccgatgatggtatgttaattgatacatctcaatttctgagctaactctggtagacttcgccgacttcgtggaagctcccaacccgtcgcctgcctccctcgtcgccgactcgactgtcgttccagctgccaacacactggccgccaaggccgtcccctatacagcctggtaccgggtatgggagaggacatccccgagcgatttcaagcaggaggcgatgattatgccctttatcctcttgattgtcctcttccacctttggggagtgcgcaagaaccgaaggagggcgagggactgggcgcaggcccacgtaccttctcttcagaaggagtttgccgtcgtcggattcgatggaatcgcccgaccggctgccgtggacgggatcaccgtggagctcgccaaccccgagtcgctgctgaaggagaagaccgcctccgagttcgccgcgtatgcgactggccgccaaaacgttgccttcctcgacgtcaacatcaagatgcccaagcgatacaaccccatcaccttcgtcatggagtatgtcttgggcttcttctttgagagctgggagccccccgttgagaaatacgaggctctgctgtatgctttcgatggcaaagaaaaggacctggttcccgttatcgctaaggatgcttcccctgttaagctgcctagctcgacttacgacggcttcatctgggctgttgtccacaagagccatatgcgcaagttccgcaatgaccgctacgatgcctctatcactttctccaaggataatcctaagctcccctcgtgggttaccgtgatgactgagagtgccgagattagcgatactctcctcaccccggagttgatccaggccattgagcaggctggtaatgactttgagttcttgatcgtgacggaccagcctgtcgacagaccgaccaagtaagtagcatcagtgcgaggcttaaatcggattcgttactaaccaatgtgtgttcctaggatcgaggagaccgtccccaagaagcgcatccagctctccgccaacctcgcctcctctgcatcaggctacgcctccaccctccctctgttcaatcaattcctacgcttatctgacaagctggtcgcctccgcccatttccgtggcgaagtcatgcgcaaggtccgtaacgtccgcgaagaagagatcaagaagctgcgacgtgtcgacgaagaagagaaggctgaggagcgccgcattgccgccgagaagttgaagaaggatgagcgtgagcgcatcctacgtggaatgagcgccgaggagcagcgcaagtttcttgaccgcgaggctcaaaagggacagaggcgccaggcgaagaagagcacccggaagggctagatgggtgtctttcgctttggaggatttctattctgtcttctcgctcctttctgtgggaaaggtgcgggttgaatgtcttatcctgcccttttgataccttttttaatttgatgtattcatatttatttgtggaagatatgatatctaccatgagagtgggatgcaatcttcatacgttcaactatattcaatgcagattttatattcagatcattgaggcctgtgtctgatttgaattccagggaagtaacgaagtagatggcgttactgccgtacatctcgtcaatcccaacatcccaacctcaccccatcactccaatccagcatcaacagtcattccaattactcggttatccttatatactctgacctgtttcaatcattcatcacaatgcatttccttgcatttccaatctcattgctcctttcagctattaccctatcccaagccgctcccacagggaacagtatcaacgccagcacaaccaccaataccacccagctcaacgcttccagattaccatccggagccattatcacccgctgtaccatcccggacacaatcgccctcactttcgacgatggcccgtacatctacacatcccagatactagataccctcgcccaacgcggcgcaagggcaaccttcttcctcaacggccataacaggggaaacatcgatgcatcacccgagatagtgcagcgtgcattggcagaaggacaccagttgggatctcatacgttcgtttataccacccactggcttactctctcttccccagcccagccagtccaagccccaacatacacttaccaaataaccgtccagatggaaccacgcctccctcgataccctctcatacgaagaaatcgtataccaaatgacaatcctcgaagaagccttcacacgcatcctaggcttcttcccgacctacatgcgccccccgttcctcagacacacgcccgtcgttctcggcgctatggccgatctgggataccatgtcattggggctagtgttgatacaaaggactatgagaatgataatcctgatacgaattgggttagctttgaaaagttcaagagggaggttgatgctggtggcaccattgtgttggcccatgattcgcatcagcatacggttgagattttggtggataatatgcttgcggatgttcagagaagggggttgagacgtaagttttctttttcctttgtgtttgtcggtggttatggggtgaggctaacgggtttctcttatagctgttcctgttggcgagtgtcttggtgatccgtctgagttttggtatcgtgctgggaggtagatggtcaaggttggtgggggtgtgttttatctcgtggttggtcttggttggtcttggtaattgttctttttcgtctttgtgctggggtcaaaggggtgtctgtgtatagaactcctaggtttcattgaacttctgcgttattctttgttcttgacgaagacgttctatatatatgcgcactcagtcaatttaatccaggttatcagcctggacagcctattttcatataataccagtgtctactgtcatcgtaggattagcacgcggtcatcaacacaatccggagaagtgaccatctagtatataattgattcgcttcgctccgcaatgaaatgcaaagattgtgggtactgttggtatttgtattgacacagtgagattgctcacatgcagcttgtcagacatttgtttgcccatttgtggtcctttatggattccaggcctttatacccttgtccccatgacgctatttaaaaaacatcatggtactactaagtctatcatcagcaatatatcttcttctggtcgcacttcttggtcacttaactatatatcatcgtctgtcgagttatatcatgccgagtgtcaagctcatatcatgttcgagccatttctctctctctcgcagacaacattatattacttggcacttgctacccactgtgccctttgatgagagtgtctaaggcactcagacacgtgtgagtggcttctaccattcttcttttgaactgtacataatctgacttgctcaggatgcacacagatcgacaacccatagacctcgagagtacaatcccaaccgtcgatggtatgactcttttctttatatgtggagatcggtatacgttgaggaactaattctgtctgtttagaaatatagcaacggcatcccaaaattcagagcatccaattctcagaaggctatgtcgcgtataagttgcaatttctcactcatctcatcgttcgaccccaactccgataaatttgggttggaagcgcaaatagtcagagccccaagtcttccaggtcgtacattatttgactttgatgccagtatcgccttgctcctcccacatattctgaattcgttcatccccagaattgaggctgtgggccaggttcttggggcagtcctcagggcgagcgtgaacactcgctttgctgatttcaagtcgaccagcactggctatatatacagacaccgcatgttgtatactgttgcgtggtgtcccggttatcctagaagccgtgggtgaactgaaagtcccatggattggggcacacttggtgaaagagccatttgaaaacgaacgaggtttcggtcgtgtgattggacaagtggtcgagtatatgattgatcaaggaacactctatagatttcactccacttacgatgagaccagctcttacgccaagtccaggtgaacagagtttggagagtggtgtactggtctattatcgaaaataataacaaaactggagtttcagccaagtcatcgctagtagtagggcaccctgttcgaacccccactctaattcgatctatataaaaagtctatactccaattcctgccccatctatatctacatagaacctacaacttcccaaaaatcttaaccctctcctcaacaggcttctgtaccttctctccagcagcagcttcagggctgccaaagactagctgcgcaacatttcgccactcgttgggcagaccccactgcttcgcagtagcagcgtcaatgagcgggctatagtgctgcaggtttgcaccgaagccgagcgcttcaagacctgtccagactggtaatcgttagaatgggggaagaagtgaaacgaagaaagaaaagagtaaacatacggaagtactgatgcatagcattggagtggtccgcccacggcaggaaattatccttgtatgcagggaatttctcctgcatgggtttgatgtgtgctgggtcttcatagaagaggatctggatattgattagctatggacaggactaaagatctcgagttccaggagacccaaaactaaaagctcattacgtaccgttccatacgcccccttgaaaccaagcaacttgggcaacgtctgcttttcccaaatctcctgtgggattttacccgtcttaacaagaccctcgaaaacctcgatggcgatatcccacagtctatcgtgatgatcgtgcaggagtacgactagccgcgtagactgggtattgaacgcactggggacatgcaagatggcggcattgacaagctcttcgatcttagaatctgagactggacttttcttgccgagcttatagatcgtgcgcctgttcttggcgagatcgatcaaagcgctagacatgtttgttgctgggggtggggcttgcttgtaggttgaggaggagaatgagcggggtgtttgtgtttggggttgacagttggatacaaggcgtgttgtcctggttctgaataatgctgcgcgggttatggcgagtaggggggattgagtgaagcgagtggtcattttgggggttcggatgtgttgtatatattgtgttttgtggatgtctgtcttttatatatgttcacacagacttgtggactcttgcttaccactcaattgctaatccgggggactcggtacgcttgtacccggtactccgtaggggcaatttccgccggccatcgtgatatcgcggatttacggatttacggattcaactatttatagataactaagcagttggcttagtcagcagtttcaaggccttgacccaaacccctcaggttggctcgtgcagaagtctaattactaatatcccgaagaagccccacttcgcgataagcgttgaatcctcagtcattcttcatacaatatacatattcttccctctaacatccatacatcacaaaatggaccccaaggtcggagtcggcgtttttgttctcaatgctgcaggcaaattcctgatcggtaagcgaaaggggagccttggcgctggtacgtgcatccaatagaatactatacatgcaatagacctcaattataatcaaagcttaccatttgtgattaaaggcacatggggactaccaggtggacaccttgattttggtgaattttttgagacttgcgcggcccgtgagactctcgaagaaacaggtctgaagattcaggatgtgcggttcctgacggccacgaattcaatcttgaaagcggagaataagcactacattaccattttcatgggtgctgtctgtgaggatggtgctgaaccccaggtaggttgattgaggtttgttttatgtgtttatgtgtttttctgtttttatatacccccgtctcgtggctgcgtacactgcaggaacagaaccaggatacgcggcttacttcttggtaggtaattgagccgaataggtgcgaggggtgggaatggatctcgtgggatgaattgcgggcgtatggggaggagcaaatcaaggctggtgacgggttcgagggaagaaggttcttttcgcctcttttgggattatttgaacaacgtccggattttcgagtttgaatattcagcacataggccgaaattgcaattaaacaaacgctctgtgtaaattatggatatctgataacccggatgctgtaaccaaagcctcatgattcattctctcaccctgatccttccaatggagacaaccttgaagctttgttaagatccaagtcaaactaaggaacatgcgagccagaattttcatcagcagtccgctgaatcctcactcgcatgacaaaactcgaaaagtatgatcgcactgcctcttgtagccatagcgggaaggccctcagcgacccaatcaccgaggaatgtctaggcaggacggttagcccacttttccgattaacaaggtgctccaccactgcctgcgagacgtcctttggatctaggagtggttgatcgaaagcagcttgatatttagtgaagccttcgatcatgggagtctgaacccaaagggggtgaatggtactaggtgtggtcagcataatttctctttgaataagactttgccagacaaacctcgtccgcacattcggagctttgtaccaatatttcaactcttgccgaaggccttcctggaaagaaagagcggcagccttagaacaagcatagtccaccatctcgccgagagtaacaaagctcgcaacgctcgctactgtaagaacatggccgcggttcatacgtatcatgaacggaaggaattcttttatgatgaggaaatgggagatgatgttgacatcgaatgcctgacgcaattgctcctctggcaaatctagaatggtatcatgatggaaaatagcagcattgttcacaataacagttggctctccgtgtgcctttcgaatagcagcgccggcttcggaaagagatttggccgatgtcacatctgtttgatagaatgtgacgttttctggaagctcaaaggtaggccggatgatatcgaggaccacaacgcgtactttattgcgagaaagatcttccattatttctctgccgatgccaccactgccaccagtcaagagaaccagctcattctctgggatccatgcctcgctgccttggaagttgtttatcactcgctctgagatctttgtgttgaggtagtaaagacctacagagccaactaacacactcagcgaagatttgatgatcggtgtatccaagagattaaacatggtgtcaagggagagttccgatagtcacacacaaagtctgagtagtcctgtaaaggtccaagaatgagaaaaaaatgaaagtcaatctcgggcaatttggattctgcagctgacccatttatattggaggaggggaaagggcggctattttaacccaagatcagcagcaatttctgcgcttgtgttgcacaggcctttggttcccgagtgtggctggctgacttttttagccaacccgagtagaaaaggagcatttcgctgcgaataccgaggttatcatcgcttcttcgaggcacatgttcatgaacagggtctaaaataacgaagatccgatgcaacacggagtcaaagggggaaagatccttgcattccaagctatgagtaaagaagaaggacgaatacatgatcttatcatgccccacagggctgataaacttcaatggctctcgtgttctgcggcctattgtactggacttgaaatcgtggccaacaaatgatattctattatgagagccacttgaggcgtctcggtaccactcctaaacgaactagatcttacggttgagataatttgcaaagataacagacactacgacattggcctgtttagagtgaaggtcgtcggcctcgtggaaagaatttggaagccttgcctcaggtcctgtttgattttcgagactagacgggttcgctttccagattgtatttcagatgtaagaacgagagagccatggtagccataatggatagtgagtatgtgtatatcaggaagattcacaagtgaggattcactcttttataccatacagcaaagcaacggaatttgagagaatcttgggctatagtgaatttgatagagaaccagcttctcaaatacctgccaagctcaacacaggaactggaaacaccttggcatttgcttgatttccctgctttatacttggaagagtgaagaacaaggagcttaatcaactcgagccaaaaacccagtcagatactataacagcgatagtcacaacctgtacaaatatcagtcaatctatacaccaagagccctgaagattcgaatacgcaccaatgaaatatctactccaggcattataatgacatccatagcaggtcgatacccctgtctagagcctctcatcaaagccagtttctcattatgacgaatactctcccgaatttcagcaaccttcccatccccatcaacgacatcaaaaagcgccagcgcattcccatgccgttcaatattcagagtaagcattttctcatccccgagctttccctcgaacgcagccgcattttcgaacgaaagagcaaaattcccaaacgaagtattgcccaacgtccatcgcggagtgccagtagctatcgtggcagtatcacagcctggcaagctaatcgaccaactattcgtccacgacaatttccggtgtaactcgaagagcggcagacccgatttatcgcgaaactcccgacacgagcgatcggtgtacttgcgaccagtcaccgtgaactgtggtgttccatcctcttcggtgatcttatatgcgacggcggattgggggctgccaaatggtctgagcacgagggttgtctttgagcgcgctatgtattggttccggaaggcgatatcgcggtctggcgatcgaaggggtttgcggggcttagaggagtatgagcgcgatagtcgagcgtcagagtaggaggtgtaggacatggttggtatgccgtgtttaatcgcaagacggacgcgctgggattatgcggggcacctctttatactagggttgggttgcattggtgtatcttgcgctacttatccctgttgcggcatttacttcggcgaatgcccgatgatctcactgattgctgagccaccggatgccaagaaacatacatgaagctattcccctcggggcttcagcggggtaagtggaatgatgatttgtggctacatccggtttcgaacgacgcatttatacctagccacctcttatacccctctcagagaccaatgctccaaaatttagaaactctgccatcccatataaaaagcaacatcggatgtactgccccggtgggggcctatatctgctgagtcatgttccacggcctccggtccagggctgtctgttaggcaaccagctaagtatcaaccacctgagtatcatcacgatcgatactgttatacaaacatggggaaattcaccgtcaaatctctagaccacctggtccttacagtccatagcattcccaaaaccgtggcattctatacaacatatctcggcatgcgacatgagacctttacctcaccaactaaccaatccgttcagaggtaacccctcttttctttacaatcttagtggatgttcagaggcattgacgataatagacatgccctcatctttggctctcagaaaataaatctccaccaatcgggcaaggaattcgaacccaaggcccaagatgtaatgccgggaagtgccgatctgtgcttcttgaccgatgagaatgtggaaaaggtcctggaagtgtttcaggatgccagagttgaagtatgaatactcggctttttcggatgcagatggagactgatctctacaggttctcgaaggtgccaagattgtagaaagaactggggccgttgggaagatgcgcagtgtatacgtgagagatcctgatggaaatcttatcgagtgagcgtttccccttttctcttggagtactccgttgactaaccccagcgacagagtgtcgaattatgtttgatttatcgataaaccgactgtgccgagacaatgggatagctattctcatagcgggaactacgttatgggcctgttttccctcctggtgtaatagaccttatgaaagtagaatgacctgggacagcagcctgcagattatatataggcaagtgtatccctcaaaccccaaatcttatgatctatacaaatcggaaactcgaaatgtattgatattctaatgcattcttaattctgttgcaaaaaaaaagtggtagaaaatcaactcctctcgagtctttggtacgaagagagatacgcattctcagatatcaatcggaatatccgggcctctgtaaatgcttgcaaaatcgccctcaccatgtaatggttcaagtcttgcccatagtgggaagttgaagtttgttgacttggacatatcgcatctcaaattattccaagagccgaacattgcttctatcccaatcagtctcaacacctggaagttaagtttgagctctcggcagtctatgaagcatcggagtttatctctgaaatgatagacgttggcacactgctgtgggtcccatgcaggtaaacgcaagacttcctgataagacagggagcctggtcttcatctaagtgtctcgggttcagattcaatgcaaaaacctctgaatacatatctctcaatcaatcaaagttcagttgacctgcgccttcttgatgcaaaaagaattggctgatctttgagatgatcggcttcgcctagttactagcgcactgtcaatatatatcatcattgagtcttttacgccacacaaggagtagcacaagctccgtacctatggttaccaaggattggtcccgacctcttataggaggagcatagaaagtaatgtctaactataggccctagataggtctatacaacccgttcacgtccgtactctctcttctatgattacatcctattccttaatagagggaatggcttctaactatattgattttcgagactgaatgggatgtcgatcagggtggggtagagtcgctgaccgccatgatattcctaggtaagagtgatcgtcttccattcccctcacctcaccgttatctccagccttctccctgctgagtttgtccctatccaaattcctgtggctctccatatatctgatctgaagtgccctaggattacaaattggtccttcagatcttcagacaacccacttcaattgtatccaacatgccgtggcgtccagacgagcccgtggaacttcccaatggccgcctagtgtgcagacagcacggactcgtagtttgcggctactgcactgtggactacagcttcatggacgacgatgacgacgtagaatccttagactcaagcgaccacacggacggcttcgtcgctataccgagaacaggctcagagctcagagtcggcacggggggcgtcttccccacgaagtttatgcccccaaatccaaatgataccccgaagtcgcttttcccactcaccaaatccgagaacgccttgccacctgtatatcggttcattcgccgcaacagccaaaaaacccaattcctggtttacacggacggcgcgtgcttagacaacggtggtgcgaacccaagagctggttgctcctttgtttacaggaattctacgacgaaccccctactccatggctttttaaatttccctctcgagaaaagtgggcccactggtatcgcgaacctgcaaacaagcaatcgggctgagcttcgcgctgtcattgcagctacgcgctttcgctactggcttggggaaggatgtcgctgtctagtcatcgctactgattccgagtacgtggtagagggcataacgaagtgggtgaaaaattggatacagaaggactggaaaacaagtggcggaacgccagtcaaaaataaggacctttggcagtgtttactcggggagatggaacggtgggatgacagaggaatgcgtattcaattctggcgtattccaagagaattgaatacagaggcggacgagcttgctaaattagctgctgataaggatggccctcaggaatttgaggatatcaagggcgtccttgtttgagggcatacgagcacagagttgctaagtctactagccggcaggttcaatgagaagttgttctatctgtacgtaggaattgggcatcttccagatccatctggattttactgttgcattcgattgatctcaatgttatgggttaaaccgaagcgtttaaatcgtgttgaataagcggatagctacctgcaggctgcagtactagcccaggtcagcttaggcttcgatgactcctttctacgatatcagctgagtgtggcatttttgcaatatttcatattcgactaaacgtgtagtcattacagaataatatgaggacacctttgcccaaaaccaaagcgcaaaccctcaaagaagaccccgaaaaaaatcctaaaagtcaaaaaaaaaatactatacaggccaaacgactcatggtatctgttgcctctggtcaaataatcaaaggaatcgcctttctagacgaggttggtataagtctcatgctaaataagactgagagggtcttcgcgggctatgtaaagcgcactcgcccgaagcttgactgatattgcttccccgataccagccctggtcaatcagccgtgtttccaggtctcgccagtagccagctttccccccagcgcctgttttcagatcgagatcaccaagacggatctcaacaggtgatttttcgtcatgtgggatctgtggatcggtcagtattcaaatctagatcatgtttcgcaacagacaggatcttgatgttgactacaacaaattgattttgcagcatgaactcaccttgataaacatcgtacagtccctcagcgtcatcgcaagcgacatctcccgggactgcgccgccggaccctgcagcccgacatccctttcggtcttctgcagcgactgcagcctctgtagcgtcgggttccgatataaaatgtgagctagtcgcgatctgtccgtgcagcctttgataaaccctgtcgctcgcagaacattctcatactgctcggacaccagatccagcggacagaaggaccgctgctctttcaggcctaggggttgcgactcgcggtttttcatctccctcagcgcacaagtccggcacctatgcgctgtggtaggcgccgatggcgattgattgagccatttgggtttcagctcggctaggctcgcgcccgggtcttcggtcgttgtcatgtcggtgatgaggagaccgaatcgctcatgtagacagagatagctgccatggcgtttcttcggacgcgtaccgtttaattcggcgatctgaagttgcgagttgcagctagagaggagaccctctgggagtctaatgagggtttggtcgactagttcctctggtttgaataatggtcggatgatagtgtcaaagtttctagcaatctctttgtaggagatgtcggctgcagtctctttgcggagtcggagcaattttcccttgagttgggctggtaggttgcaatgatcctcgaatgcaggtggagatagtggcctttttgagtcttttttaacgagtactggatttccaacaaatcggtaaatcacatttgctcctccctcggcgaggtaaacgagccgaactcccgaggggagttcaaggagattgggtttggtcatccgttagaaggatgggcgttgggctggaaatcctctgcgatcatgacgtggctgatagtagacaaatcgatttagatcgattttgttaactccgccaccgacgataatgcgtagaatagaatctaagatcgaaaggttgggaatgtgaaacaatgctttaatgaattatgcagatgtatccagtggcgagaggctcaaagtggtccaaaggggttaaaccgagtttagtcggatctcacttccaggctggggtgtccaatcagcttcgaaagcgaaattcaactggcacgtctaagacattcaccaaccgaaaggagtaggattcgagaaaaaaacggagattccggacaaagaagcccgacattgactgaaaacccccggggcaagggtttagttgtggggactcaataagagtgcgagtggcgtaacccctagagtcgatcatagcaaaggagttaaagggtctaggaagttcgggacatcatgaaatcaaggaacctgaaatcatgaaaaggaagatctccatgaagttgtagaattggaaatccccagattcagaggagaaaatccgatgaagccgtatttaaagacaatggcggtcaggaaatcggatatttcaaattgtagagatgcagcgagtgagactgtgcaggagccttggaaagaggctcgagggtctgtcaatatcagttgggatgtgaatctgcaaatgtctgcaataaggaaatatgtcaagatgagtgaaaaatgtcgtaaatgtcggaaatggaagttcaaccctctatggcgtgtcactgaccacatcctcatcatttccccgggttatactcatctcatctctcctcatctctccatctaatctccctcctacatcaccccaatatccttttaccccgccatttcaccatcaacatccaacatggccactatcgcaacccccgcccactgtatcgccgacttctgtctggtccctgtaaggaagtcacatgctgctattcacctcccccgactaacagcataaccccagatgggcacctccacgccctcggtctcagaccaagtcgctgacgtccatcggatgatcgaaacatgcggcttgaaatatgtcatgcattccgcaggcacaaccctcggtacgtatggagtacatgtctcgaggctataatacgtactacactatgcatagtattgtagtactacctcggccactccggccccattccggttcctacttgtgtagaacctgctcctctcatctccaactgtgggctgatttgtctctacggctgaaactaaaatcaccggagaaagagagagctgagagctgagaggcccgtgtgacactattcctatacttactgacgttcctggttttgtagaaggaccttgggatcgggtttctcaagttatcggacaggcgcatacgatccttcatcagaagggaattgttcggattcatactgacattcgcgttgggtcgaggtgcgttcatctgtttaatgcctccatttctcattgctgatcgtctttattaggaccgataaggtgcagtcgtttgaggacaaggtgaccaaagtgcagcagttattgaaaaaatagaggagttcaactccgaaaggcaataaaggcaattgactttgaatcatctcattcgttaaactatatgactagactagatatcctgagcttgggggaaatgctgaaacctgccatcacatcccaattccaacccaaaacgccttgctcttgaatggaagtgtcctatatccctgtgtaccgtccagtcagggcacagccccatatcgcaggactcaaaagatatccaagaaaatacatccgaacgcttcaaatgtaaaaaagcaaagaaaccgaggtcaaatcactcagctcagaaggaaattcccccaccgagaagattaccccagttcccaccagtccaaatccaatttcccatagacaccgacgtgcccgacttcgccgattccgcaagcttaaccagcgccttgaacacattactagtagacgaggcatcactagtcgaatccgccgaagtcgagacagacgtgcggccaaccgcattggtgacattattcaaggtatcgacagtatcgatcgccggaccacggttgaagaagtccaccaagatataggtcggctgtcgcccactccacgcctccttgcaagttgtcgccgcagtgcccaggttgcccgttccgccggacgcggcgttcgtcgtggccacatagctggagttcgggtactcaacgtccagtatcgcgaggctgctcgagtacagaaagtgattcatcaatgggagaaaattggctgctagtgccgatgcgctgttgtctttgtatgccgacggtcggtccacctcgcatgagaagttcgacggggaggatacgtcgtatggattctcccagatgtagctccattcatccatcaggtaggggtaggtggtgctggtgtctagtgaggccacgaagacgacgaggcgcttgccgtcgtcgatcatggtttggagggttggccaggtggtcggggcggtgcctggggatgtcggctcgtaagcgtagtcggtaatattggctgttgtgaattgggtgttgagctcggaggctgtggcgtcgtcggagttgactaggaggattgtgatcactgtttggatgttagtttcctttctagacgtcgtcgcggaactaactcaccctcgttgggattatcatccaaccacgtcttgatgtccttcagccaatcgctcagcaaccccgcatctagcaggtcgcagctggaatggcataggcgccattgtgagttgctcttgtggacttgggctgttactaaacggacacccgccgatagttgtgttggagtgtcgtagtactggttggcagctagcgagttgccagtatcggagtcacgcacaaaaggactatcgtgggcgcccagatgtgtaatttctccataggacttggagcagagatcaggagagttgttgcatgctgtcgtgcgcttcgtctggaccaaagggttcgcaaggaccataggcaggaatgccagaaagttggatactcgcataactgtacacaaatgatgtattagatgtaccaatatacttcaagattagaaagaaagatcaaatagaaataagaaatagaaacacaaaacaaacagaaaggagacacaagacctcaaataaacaaaatatttgtctccaaggccgcgttgccctctcaactattcttagatcggtggagcagcaactgcactgccattgggccatttacaccaatcgacctcctctatttgtgacatagcccacttgtctaggcataactattgtgtacggttttatatatggtttttcttactgacccttgacgatcaatgtctcaactgcggggaatgacatacgtgtacggagtatgttgtgcgcagattctcggataatatgggtattatgatcaattatttacgtatttgctaatatacaggcgattcgcaactatcatagtcctttaagcgacaaacgtatacccggggcgcgtcgcttcgttctgcttgctcgtggcggattcaccaactgctccaagttctgttccatcccatcgaagagagatggatcgccccaagcctggaacacatcgttcaacacttgttgaaggggatacgggttacgccgtcgcagcatgcgattcatgcgccgcgctgacagaatatgatggctgtagagcatggccagccggtggcgaactgcctgtgagatcaatcgcttgtcaagacgaagaccggatttttctagctctcgaagaagaatcagcccccggacccatggaatgagcttctcgtccgtttgggaattaggtggggggatcgcaaatttcgatgcggtagtgtccaatactcggaacatgaagccccaagagacgatggcggcttgcatttggggggtaaagacgagatcgagcatacgccgatcgcgaccgtttgcctgcttggcgggatcaagaggggatttggaagatggaaaattcgcccaaggcttttgctccgggctttcagcgtattggcgaacgagccactgacagcaatctcggagtttatcccagtctgcccatgcgtctgccatacctagacgcttgagcatctcaacccagaatgcagcactgacataccctcccgcgggaaccacgcgctttagaattttgaagatgaagatcacttcatcgacggcagacaggcgttgacccggcggtgggcgatggttcattcgccgaggggtgagaatctgctcggccatgaaatccacgctttcttcgcccaaagtacgaccacgaagagctagctcgtcggcgaccttggatgccgcgctcaattcccaggctgcgatatgcttccgaaagtggatgtcgtacagatctggtgcgcccgggtataattctgttaacaccgctagagtcatattgtacaatcgccaatcccgggccatgtagtaagataccaacagtgattcctgcatacgcttgtcttcaagggtgtcgggatgctgatcgctgcggaggacatcggagaggagaatgtcgcggttctgagttgcaagtttctggactaagcgtgagaagacagtacttcctatagaaataccggactgcttaagtattttaagcttgtccagaagatcttgattaccgtgggctctcgtggctagttcgcgcaatgtccggtggccgatctctgatacgccgagcatcttcaggccaccaacgatcatatcgaaattgagagcacgagtggcaaacagtttagcacctatgtcatctttgaagggtgtttcgtcttgcgaccccttttccttggatttcggggctgtatctattgggccaggttgatcaatcgaagcttcggtatcaaatcgctttttgacatagccgcggagccgattgaactctttccgtagcccgaatttctcaacatattccagcaatggctgtatttcctcggggctttgtgggtgatcctgacatcgagcaaggaaatgatgcattgagatcgctgcttcgccgtggccttgctgcatgagcaccgcaattacagggccataaaaattatgctcgggcatcgtggagcatatgtcttggaatgcttgcaatcccggcgacaagggcgaccgctcgagatcagccaaagtcgcaaattccgtgccagccggaagagacgaatgcattgcagagggaagtattttcagcacgtcatttgcgctggctaaatgagagcgttgaagcttcttgtgccattcgactgcacgttttgtcaagccttgctccagaagtccacccaccacgcgctcatacagctgtggccatccgttgccttgttgctcccgtaaaatgacagcatagtcaagaacctccttaagaaaaagctctcgccttaatcccatgcccacaaagctttgccaaaagaagtccgcttgctctcctgcaactgggagccgtacaccatccactcggaccctcaacccttcccatatgtctagagtaccattgtcgccgtagtgacgctgacggtatcgaagaagctcctcccacagatcgaaattatttcgatgctctggatcgtccactaatcgcgttccaatatcgttgaggtgtccgacgttcgattcgaattcaagcttgtccggtcggagagacagaagtttgatagggcattgtgtcgtattattaggtgtttggctctttactagaggcgtgggctcaagggtgtttggttcattcgaggcctcaatgtcgtagatgggaaagctgaatggccgtttccctcggcatggatcctcaagctgatgccgggtgttattgtcgggttcctcgagtaattcttgtttggcgcttcgcgaatgacatcgtatacaccggtacctggactccaattgctcaattccgatcggtgttgctgtgagtgtgtcaaggatcgagacggcggacggcctcttcaacagtcgcagaagcgccgggcgcatgagtaattaagaaaggaaggtcgggaaatcaaattatcaacgtcaaacatccttctttgagctccccacgtcaatccaaaaagttcgttgtcgaatattcaaacgttgatacgcgtctgggcacttttctggcgcttttcccttttgggatgatgactagatgcaacgtctgattcgatcaggtgatgctcagcacgtgacacgatatccagctcattccgggaccaacttcacatccccatttcgccctcatcgtacctcacatccccgctccttcttcgcttacaaccgcgaaaatgttccgtgctactagctcccgcatggctgggtatgtactcccttcgaattgccacaataatcccccgcgcacaaacccgactttgagagtgcgcccatcgaatttcctcccacgatcttcggggtccaattacgattgacgcggctgcgggacctgtcatcccaccattaattacaatttatactgactggttctgcttagcttcgtgttccgtgagaaccgtgtgccctactaccagcgtctcttccagcaacacgatggcaagcgccaatggtacaaggtcagtacccgccggaaggggcatatgccctcaatgaagtttccggaagaacaagaaactgacattggaattgtctcgcagacctcccgctccggctacgtcatgtacccctacctcatctctgtctacggcctcggtgctggtgagtagacccgtcttccgatatgagatccggtcgaggatagaaactaatcgtcaatagctaccatgtacgccatgtgccgcatggttctcgttagtccacccagccgctacttctcatactctaacgagaagcacgagcgttcatatgctaacttctttacagggccacaagacttggtactaaattataggtctcaagacttagtccggcagagacaaatgatgccatttccagtttcgttggttattcaacctgcggcatcagttgttttttgtatggtgtatttctactccaggaaggggttagatgggttggcagccacgcagatttggagctgtacatatgatcaattcaagcgccaatcccagagatgctgccgtaaatcatttccctggtttcacagaactactggttcggtctcctcgcccaaattgggtggtactgtttttgatagaatagagatggttgtgctgtgactcgcaacagcccgaagccgagctatcttagctcttgttggtctagctagacatccaagtggtgataacacactgtctaggtactaagtacagtattgctcacatgtacggcagtggagagatatcttagttaactattcggcgaaggtcgaaatggatgactcattacttgcctcgcccaggccggctccaggcgtacaagttcattcaataatatctgctcaggacatatatggaacaaattgagtacagaaaaagctcgtagtggatgaggcaggacgtgctaaagacggttgtgggcatcgcaggattcaagcccggggctcaggcgccccctcggcccgcttccatgggctcacccccgggtgccccgggccgctttataattgattactcagctgtttcacagcccggccaattttatggtcttacttcctctggaccacaatatacaatggctttgcttgtgtgaacctgtatatccctagaagcaagagcatgcaccaatcatatatatatctcgatatagcctgtcaattgaggcaccgaagtacccgacccatgctcctataatgactgttctctttgagagcattgaatataacaatggaacacgagagcttcgcctattcagagagacccgctaagcgggttcgtcaagcctgtgagccctgcaggtaccaaacccctcagattgtttacaaagatagctgttaaccagtttcccaggcgtaagaaagctaaatgccccggagagcagccggtctgttctctgtgtgccaggctacggcaacaatgcctatacgccgatgaaaggcgtcggccacatcccgagttgagtccacgacccagtgattcagaccctcgaacatctcgggtcctggtgagtatttttatctctcaatgcaagcccgaagaaattttatgcaaatactgattccgtcataggaagatagattgcgaagccttgaaagcaaagtgggagaggttctagatgtacttgggtaagaacatacagaacctctatgtaagcaattacttactcttagaaacatgttgcagctcgaggagtgagccgcaaatacccacagaatctcttgtcccgtccgtgacattgtcaatgcgaagctcatcgattactctaccaccatgggaggagattattcccattgcggagctctatttgctatactgtgactctcagcctctacctcttttctacagggatagctttatttctactctaccaacacgcgaggcggagcttctttttgctatattggcactcgcctttcgcttctcgtacactcaccacagcagggccgattccactagcctgatcaatggctatgctgaagttgctcggggcctcgttatgaaaagagtctcagaagggccagtggagctttcgacacttcaatgtctttgtatcttgagcttggtcgactttacgagtatgaacctagcgtttccaacatttaaactcgagctaataatatctcccagacggcaatacacatcggtccagtatccacagcagcttagcgatgaatcttgcacaatgtgccaatatcggccaagagccccgttcgtcgaccagtaccatagttcgcgaagaacgcagacgctgcttctggagtatatgtcttctcaaacgactacacggcggcgacttcccaatcccagacataccccaatccggaggccctccatatccccaaagcccgacacgaccagcactcctctctccgggagcatcaaccgccgaaacacggcgaagtgacatgcaagacgagggaatcattgcatatgtggtaatgctgagcgaagtgttcgcacggacagcacggtacgtgcgacttcacgggcgtccaagcaacgtcccaccttggtctcctcattccgaatactccaaaattctcgctttacaaatggacctcgagactcgcatgccatatcttcataggttcaagccagccaacctcggggaacggtctctcgaggaattacagacacatcgtgaatactggggtccgtggtttctgaatcaattcatgtatcataccagcctatgtctactcaatcatccattgcttctctcgctcagtcttcggaacttccggagtaccatcccggagatcttcttgcagcacagctcagacttgatctcttcgcatacaacctggatcattcacttcatcaactgctttgaagaaaagtcatttctagtatcagatccattgctggggtacagtgccgccgttgtcgctacaatcgagctgcaactcagtttcacggatgatctgactatcagggaacataagcgtgagagattcgccaagtgtgtgaagtttgtgcaaaccatgggagaacggtggccgcacatggctcgactggtatggtcccatcttctggctctctcggtcaaaacaacaatctaataataccaaaaggcacatagattacagcgactagaagacgcagtatcagcaacctaccaatcagacccaggcgcgcaaaaccaaagcctcctgattgacctatctcgattctgggaaatcctcgaatactcatccaacagcgacacggactctgctcggcgtctatttggggattcactttatgtcggttcttcttccgcaggtggagaagtatctcagacatctcctttgcctccgccgttccgcttgagtgtccaggagcaagatacaccgaatattcggtctcagtcgttcggtaccaatactgcctttcctagtcaggactacccagcaagctctttggtctcgccgcagcacttgacgatgtctaatgatgagttctctattcttgccgccaatttcttttctcaggggcaagagttcctgcgcagtggtgataactgggagagtgttgggaatttctaagggcttggaacagcagacttcaaatcttgtgtgtctctacattttcttcgatcctgtgattgaatagctactagcccacggcatatcattcatggtgcattgcattatcatactcgacatttatccacatctcacaatattaattatcaactaggaagaggccaaagcgcccttgaattccttgacaaagttgaacacctcggagaaggtgttgtacaacggcactggcgccacacggacaacacccggctcccgcttgtcacagatgatacccgcattctgtaggcgttcggacaccttgtgcagcaagccaggcttgagcaaaacactcaattgagcacctcgagcattggggtctgacggagtgataatatcaaacagacgagtctgctcgtcggtatccttgagaagcaggaactccaaatacgccgtcagcttcactgacttttggcgtaaatcggccatggaggtctggtcaaagacggacaaagccgcacaaagacatgtcagatcaatgactgacgggttggacacctggaagcctccagctccgggaataggcttgaactctgctggtggtcagcatatgctagaatatgtatcgcgcgacacgagtaagaagaaactaactgttgtccatcttgaacctcaccgatcggtcaccaccataccatcctgtcaagcggtgacggaacttcggagcatctggtccagcgctgtaatcgacctggccatgtctctcgtgcacaaaaattccacccattgcgccgggcccggcattaccgtacttgtacgtgcaccaagccgcgaagtcaacgttccaatcgtgcagcttcagctccacatttccatatgcgtgcgccagatcccatccaacgacgaggttctttgattgggcgtacttggtgattgtggcgatgtcaaatagctgtccggtgtagtattggatgcccgggagaagcagcagcgctgcgctgtcggcatgttcatcgatataggacaggattttctccgtcgagatctcagattgaccctcgtctgggccaatgagaatcatgttctcctttgcatctaggtcatgccaagcaatgtgtgattcgatcgcatactataaacgtgttagcgatagattatcacctgcaaacatcattttcattgcaggttatcactcacatgatcactggggaatgctttccaatccatgagaatcttccgcttagtctcagtcggcttatagaagcttgcgagcaacaggtggaggttcgtagtcaacgttcccatggctgcgacctcttcaggcgcggccccgacaatgcgggacattgaagcagctgcctgttcagacagtagctgccattgtttcaatggtgagtcttcaagatcggtaaaatgtccacagacaccgatggacgaccaagtatccaactgagcctccatatacttcgatacggccttgggctggatacccaatgagttaccgcaaaagtacgtgcttgggtctgacgacagacctgcatgatcttgttaaactagatttcgcgtttccgcggggatatggttctcacctggctttgccagctttttcgtagcgagattcgccttggagggaatgatgaattggtcgcggaatccacgcagaggatccgccgcatccagagacgcggcataatcctgggatgctgcctctgcaggatagactggctttgataatttacccgtcatgttgcctataaatgctctcgtgaaatgcgtcgaatatggtaagttaagtcaagccgtgaagattttagttgcaaccaacaatgaggggaagagaagaataatgagtgcaggttggaaatggaattgctttttatacggcaagtaggggagcaccgaatcggagaccagggaccttcaaaggagctggcaatggtaaaccggacggtgttccgcttccgcctccccgatccgcctccctactgtttataagtggttggctacttccatggataacctatcgttacatcatggcttgacactcataacataaaatatatagatttctttctcctaggactatctgccatggattgtatgcattaacgcatgaatatttgcagatggcttgccatgcagaccacaacacgacctaggactctttgttagattggctatctcaagtatttcaatctggaccaatgtcgatctctaaaagtggtaacaggaaactaatttatgccgcaagtatgttgtacttttgaaattattcggtgttgaaccaacggagtcatactaagcctatctgtggatcacctcgcacagttataatatcccgtggagaggcggaacacggatatagatccgtatatcttccggattgtatagatcttttgactaaatggcccggtgcaagccgatgcagtaagatatttcaataatgagcccatataccactaagactattctcgcattataaacctaaaaggctgtcttttccctctgtctttccacgccagacgtgctcttcctcctgaacgaacactcctacacaatccattatccacaatgctgcaatcaaccgatactgttctcaatgacattttcgaaagctatgctgagcagggctttctctcggattgtcttccgctggccagacttgcaaacccctattacgaggcctgggaagatatagccagccaactcccgaacctcatccaaacaagccaaatccgcgagcacatcgataatatgcccgtctgcacaactgagcatctcaaaacggaaccagaatggcgacgtgcatgtgttattatgggatacctggcccatgcctatatctggggaggagaaacccccgaagacgtaagcactcaccaccgttcagacaaagatatccctaacatccagataacagagacttcctccttcaatctcaaggcccttccttgaaatatcagcacacctcgaacttcccgcctgcgccacatacgctagcctcacactgtggaacttcataccttcccacccagaagcagacatcacagacccggacaacctccacattcaaacctccttcaccggcacaaaagacgaggaatggttcatggtgatctccgtcgccgttgaagccaaaggcatcaagctcatctcgctgatgcgggacgctttcaaagcagttgctgccaacgacgtagacctactcactgccctcttgtacaggtttgccgatggcttatgcgacttgacattgactctgaaaaggatgtacgaacataataaaccggctgtcttcttccaccagcttcggccgttcttggctggaagtaagaatatgggtcacgctggtcttcccaggggtgtgtactatgatgttggtgatagtgatggggtggaaaggcctgagaattggctccagttgagtggtgggagtaacgcacagagctcactgatccaagcacttgatattttccttgggattaagcactctgcaacggatgggaagcaagcttgcggtcctagttttatccaggtaagagcatcacaagatcttagttttcagagtctctatcttgagacatatgcgaatcagtactaacaccaaagacagcaaatgcgagactacatgcctggtccgcataggcgcttccttgaagagctatctggtcgagctagtgttcgtccgttcatactggagtcgtcggttcaatcgcttcgggatgcatacaacgcagctgtgaatgagctcaaggctttccgcgatacacacattcagatggtcacacgatacattgtcatggcatcgagacagcctaatccggttcaacagggaaaaggcaaaatgaatctagccacggctagctctcaaatgaaggaagcaggcgcaaagactaagcttgctgggactggtggcaccgacttgatacccttcctgggaaagaccagagatacggttcaagacgctaagtgctaggtgttcatatggacgtgggatgattaaacgaacatttgtgatatagaattgtcttgcaatattgtaaattgagattggttgtttgccgctagtactatagttcaaaatgaccttcctaaataaagaatcatgtcccgaactatgtagcgttggatacgtcctgatatccgacatcaacgacgagaggactgtattcttgtggaatttcctcttttccaggtgaatagcaaatccccgagtcaaccttcccgcaaacttggtatgaatatggtttggatgggattcctagtgcattcctaggaccctaaagcatggtctgcaatgtcccacctcgtggatatcgagaaaagggccccatgtgagtgttaggaacaaagctgcgatgacgcaaatactccagcctcgtggtcatagccggcatataatgcgatagtggtgatgaatttggtgcaaacagacaggttgtatcgtgtggtcaagcgattatcaaaagcataaagacacgaacttcgactgttcagagcagtagacatactcaaagtctcagcacttaggaaatctggaccagggtgatgagaattgttggccaggcacattctgggtgcccaaaagccaaccacacggcgatggcctggatttttggcttaagagaaacgcgtaaagcaatcaccgcttcttcgtgttggcgggcacaccctcactctctcgcagctcggccagatacctctccctcttgatcaaccgctccttctcttccttgatcatctgctcaactgtctgagtggcctcggccatgcgatcaagctcctttctctcggtcatccgactgtatgggttcccgggcgcatcactcatcggaatgtccgccgttctctgcgcaacctgcttggtattcttccccttgctcttgccaagctgaccaccagcaaagcctccggtaagtatctcgtagaacggctcgacgggctcattgaaaatgatctcttcgtagttctggctgaccacagtctctcgacgctccttcattccctctgcatctgggccgtaagggtgtagcttcaggctatgccacagggtctggggcttctcatttgactcgggcacaaagtaaagcttgatctgaatttcgaattcaccccagccagtctcagaaacttcgaagggcggatgctcgatcgagcgcacattgtgggcatatgtctcatgtagcttgaattggactttctttagccagtaggagatgtcctcgccgttgattccctggacgaatatctcccacctgtgggtgtgatctggaggacagtctgggggcctgttatcgggatcgaaggggtgcgctatactgccaaatactgtgtttgttagtttgtgactgttggcgatcatgcgctttttgcggacataccaaatggtcggaacaccgagacaccctgcgagcgtgttagttaatttaattgtaatatttctagagattgaagcataccctgacgcgcttgtttcctgtcgcagacaccatcttgtaagttgtttgtggtagaaccagatgggcatggtttgtccagagcagcaagggcgcaagaaaggcacggaggaaggataatccgccggggctcaagcctgacaaggaggcgaacgataccgaacaccaactttagagtcctggtcaaggaacaattaccttgaattatttaactattttgcttattgaaaagcttcatattgacttcctttgctcacccctaaagtctcgattgcgagcctaaatagctaggaatattgttccaattctttagtgacatcattgtccagagctatcccaaaactacagcatgccgaacaaaagactagttgtcgccggaggaagcggttttttgggtatgtgatagccagcgcagagtatcaatatcatttcactaactagctattccaggttccagaatctgtaaagccgcagcagcaagaggatggacagttacatcgttaaggtagctttcccacctatttatgaatctacggaagagcacgatactgatagctgtccagtcgatctggtgagccccggtgggacacagtcaccgactctcaggaacggcccagctgggcaggctccgtggaatgggccaaggccgatatcctcaagccagagagctacaagccacatctgcatggtgcatctgctgttgttcactcaatgggcattctcttggaagcagactacaagggagttgtgcaagggagagtgccaattctcagtggccttcaacgagcttttagtacatctaagctcggaagccagaacactctgacaagacaagagggcgaggctttggaaccaaaggagaaagataggcagctgacctatgagctgatgaatcgagattcgggtacgtacaagagttccaaagtctgtttcaaaagctaacatgtgtgtgatttagcaattgcactagcccaagagtccgccaatgaacatgttccgaccttcgtttacatctctgcagccgccggggcaccggttctgcctgctaggtacatcagtactaaaagagaagcagaggcagctatcatatccactctcccggacctacgaagcgtcttcatacgcccgggcttcatgtacgactcgagtcggaagttcacgctgccaattgcaatgggtggctttgttgcctcggagttcaacacattcctcgggaacaggcttgggttcctcggagctatggccgaaaagcccctcaaagccgacgttgtaagcgaagcggtggtcgaggcattggaggacgagtccaccaagggtgcagtcggaacaaaacagatcgaggcacttgcaacaaaagcctggagaaagacgatgctttaagtctgttggctgatcaagtgacttatgtttgtaaacaatgtttctttttttggcagaggggaaaacgcgtggaatctctgctggttgattgatgtcttgtccaagtacagctgtatatcttggaacgtccactcatgtaaaatatcgcaatcaatctcacatttaacttaaatcatagtgccacgttcgaagctgtcccgaatttcggtggtgtactagagaactgttagcaaaagatcacacaaagacaaagcaaggggacactgaccttgttgtagaagcgagcgagtttctggttgaactgcctgttcttctcgttgatatatgtcacatccgcgtcatcatcaccaccacggcgctctttacgtttcttgaggcgcacttcctctgccttctggatatcgttgaccagtctgtcaacagcagcccgatctggtttgctctccgtaaagccagtggagtccgcagtggaatagaagctaccgttcttgtcgattgcaatcatttcaccgtcctcggtctccacgatctcgagatcgccattggccgcggctctctcgatcgcggcaagcttgtctttctcgtaggactccaagtttggcgccatttctctcaactgtctcttgtaaatcttccgggcatcttgagtgtagtcttggaaagccacgtcatctcggtgacgttgtttcttctccatgcgcctatcccacttctccgattcatccactgtccagtcccatgcacgcttgcgttcaaaatcatcgccttcagcttccgtgtccgctttaaggaggttgtgggaggcgaatgcatgcttgcgggacaatgtgtttagcagggccgggtcggtggtcaaacgctgagactcagctgcagtctcttttaagttgcgttccgttgcatttttctatatggtatgtcagttatgtaaggggttggtctggccaagtctattgatccgcgcaaatcatttttggaagccacttacagctcgagcctgcaaggctttgaaccgattcattctctcgcgcgctttagatgcagcgtcatcctttgtttcatctgttcgggtttcggccttgtcttctgaagttgcgacaggagattcgctcgtgttctcggtcggtggctcaatgaactgctcttggctcgcctcgtccttggcggatttatccgcatttctggttcgaaccatgatttccttgggttaatcaataggccaatagcagctatggacagagagcggtaattgttttgttggcagctaggttgataggaaatggaaggtggttgaagatgaaataaaagcgcgaatgcggtcaattgccgcctcccacaccgcccttgatctgctggcgaaaccccagacttccaccccttatcgggccgtgtttatcttctccacatcttctgggatcagctttactctagtcgtcatgggagggctacacaatcggttgttgctgctgcaagccaggcaacggcttaacactgggaattttctgtcacggcaattggtgcgcagtctctatcccgcaacgattaaacgaccacatgacccatcaccgtctgaaatgcttcgattcgctttaagagattccactgagccaatttatgactcgaatgttaacgaggtcttatctgaataccttcgtgggatttttatcaccgaatggaagttgaatactccgccttccccgttgtggacctccctcaaagggcctacatcgcggaaccaagagttgttgtggaattccaatagcgacatcgccgatgtctcttccttgcggagtctaattgagagatatgtcaacgacagacatggagcagagattttgcagactaataattgtttaccattacatcacgctttgcgacgctgccaacgtaacaacacattggcagaaatcctctcggtgctacgtgacttgtttgcaaggctgaagcgtctccagcttcccatccggcctggaatgtacactatagcgttatacttcgcatctcttgatctttcgccttctgatctcaggtatttcttggatggccaacaccacatgggcgctccagctctaagtcccaaggaaagtctgcggatagtccgatattgctctgaagcacttgactgcaaagtttttgaagacccatactatgaccccaatcccattcttgccgagattacaggcgaaggagaatctgtgaccgaaagtcgcaatttgcatgataccttattctggacgcaatctactgatcaaatcggcaaccgattcaattatgagaccaaagcccaggattatatctgtttacttactaggcttggtaatgatgaagtgcttcacagatgctggtctcatttcttgaagaacattcaacctaagaactatcaaagctgcatcgctgcctatcaggtagtgttggctctggtccaaaatattcagtccgaaacagcggtgaaatggttggaagatatctctcaacattgtggtgataacctgccattcattgcgaaattcccggacattcgattcctccttaatgaccttattataggcgaggcactacctgacctagtgaggggagaggactacctcgaactacttaagttttgtcttgaggacatggatcgaaggatgggtgttcaatggagccctgagagtcaaagtcatttcagtacggccttggacccaatctacggagcatttggtgatcagcctttacccaagactgataacaaatatgctggctatgatcatggcgggcaattgtatgcagagcttcgcgttcatggctgctccaggtctccggctgcactggccagggtcgtagatctgttgaatgaccacgatggacagtcgcagaatatcatcactcatcttgattacaatgcggcacggcttaatgaatttcggtccaaatttaaatctctggaactccgatgggtaccagaacactcaccgattgaattctctaactcccggattccggcgatacgtgatttctctaggcctatgaccccatctaccctaggccttattcgggctcgtttgatcattcatggagttcctcaaatggggatcgacaatttacatttgatgcaactcggctgcatggatatgcggtatggtccagaccaaccatggcagccatctggatatatcgtggtttgggaccgtcatcacagggaactcctcgggctgtatgttgggcagaacactggtgtcattagctgtggagcaccttcggatggccctcttggtgccttgatgcatctatcgctctcaaccaatcctgacgagcgaacattttatcctaggggcacgcgcactcattctcggaactgctggggtccttactatctggatgtagatccaagtgcagatctagagtattgagcgttttcctacagctctgtgagatatctatgaaatcatgaaatcatgaaaatgtcttttggacactgagatgactggatgttgttatgagtgagcggtgatgtgcttcggcagaattcaaatgtaccacaacgttgtagtcaccgggcatatccttttcggctactcttccatctccaatatcacttccatattctcaacaaacggaaactctacgatattctgcctcctccgactagaatccaacggagatcctacccatgtaccctataccctatgcctgatcggcctgcttccggcgtcctcggagagtgacatgcactgagattaattttccctgcattagagtcaagccacccaagccattttcaatatcaagtattgtccgtaaggatggggcacaccatcgaagtcttggatgtgcctggccacgaatggtaatttgtcggaatatctcttcctattctggcttacacttctcccctgcagcacacagtaaccgcagatcagcaacgctctcgaggcaattattgcagggaactataacagccagcgcagccacacttctacgtggcggtgcatactgaaaaaccttgacttgcatagtttctcagtcgcgctatatcataggacaattatcaaccaccaagtactgcagtggggtcattgtgatctgcgtctagcctaaagtcgacgcatgagaactgacctggaagctcacggggccttagttcctacacctgccaatgaagtttcaaacggtcacccttgacaactcctgcatttgcaggtcgaagaattccaatcccattattgggacagatcaattcttccaacattgcaaaatcttcacgaatagtccacagcattggcaacgcatatgatatatgtagccacaatttacggatccattatatttacaatagactgtatctagcgcctgggcccagttgagtccgactacccttagttcgttcgcctcaaattgcagctgcctcgccgatcgatctgacagcaaacgatcattgccccatccccaattggaacaggtgtcaaagtccgcccgaagacccataattttgggggggtgcaatggtaagtgcattgtcctggaatgttaattgaccttgaattccaggaaaggtatctcgtgaacttgctagtttatatgcgtctgtgtttcctccgaaagggcttactgcttaccactgtcgaaagtatactccgggactgcatcatataccaggatcagcccgccatcacggtaagtcccagtgaacacagcttccagattccctgttgtggggggaggggcagatctttttttctgaaggattgccaagcaacggttgaacgccaatcaccgcgcctcacggcagcttcccagctccagccacttgggatttgaaaaccgggtcgataccagctggctgctccgaaggcttgtcggtcagcatccggcaaacctgctgttctgtactctataaagcggagatctgagttttctgctccaaagcccattacaccgggggtactgtttatcattttcgacggactaagacacgatagtccgccctatggtccaattcgtggcccactgcggagtactactccgtaaaccggttcgcaaaaaggcatcattccacgacaaggactttgtcactttgcctcgttttttcgaccccattagcaatatcctgataggtcaaaactgacaacccgtatgccgacacgagatacttcagcgcaccccggttcccagggaaagctttccagctgtacacgcgagttccacaatgcagaacagcttccactcatattcgattgcctgaccgtctttcaagagatcaaagaccccgagtcggggaccattttttctgccaggaacagtgccagtccatttagttcatatagctcctccacgcaccatttcccatggaggcacagcccacacctatgtccgcagcagacgtcttagtactggtttccccttcttgtggcaaaacccgctcggcccgttcccccggctcttccctttctcatcatcggtggatacggcgccaatcgtagagcatcagtcgaggatgtgtttctactagaacaagaagaagtatactgttgatgccatttgctattcgccctcggtccctgtcatattccagccctcgggtgattggacagctcgggaaacccggacaggggtgtttaaattttgcgctgtgcgtggacgttttttttcggtccctgaggaaacccggtggccaacgaataccccctagggaagtatagatccaatctcacagggccagcgaagaaaaggatcatacccaagtcgtgtcatgaggcattgctgttaaccggctgcattcacatgccgattatcagatgctttcattgaccgaatatgtttatctttcccatccaacctatataattatatctgggacattggctctgttctggtcgtgattatctgatcgctttgtgcgttatattcaatgcctcatctgaaaccaacccgaatacggcaatatctaaactataacacaaggaccaactgtcggcacttgcgcaaatctccgatagatgtcgaggccaccgccacagcaatgtgggaattccacatcggagcggccatacatcgaatcggtcccccgcactcaacaccgcggcccgataccaatgccctatccataccgacatgaacctcgacagaccataccccagagcacgagctatgagcaccctatgcacggggcgccccttggcccaaggcttcctgccttgattgttcccgaaagaaacgcagatccacgatatatgctctcgtccgacattgcctacctgaatacacaacatatgtcccaaacgctccctctgcgatcccatcaccaacctcctggaagctctgatgcccgtggttactacaacccatacgaagagagaacgtacccaagttcgagccatgcccgtgactatgatagtcaccggagctggacatacgacgtggagtcccagtaaagtccctctcttttcgtttctgtcgattaaaccacctctatctgtcagtcatccgtcctgatgcgatgtctttggcttgagaattttgaacaaaatcctcctctcacgtcacatctgtgacaggttacacaaggcagggagacattcgatcaagggccacattctaaccgcgaaattcatatagacacagcaacagttccacggccatgcccagccccgtctggtcagacaaaagtgcagctacgcacgcattcaatcctatactagccagtacccaccaaggtccgaaaccacaatcccgaaacgcgaactacagaatgccacatggcttcgacaagctcctccaccatgacccagagccgcaatcaccatcacctcctccacgacccagacgaccatccaccgaatccagataccatctccacatccggcaacagcccatcgccgcacgagcctgtggcgcaggcgacagagaccgccgccccgtcgacccacctccaatcgtgcagatcctccttaccgacttcgactcgaactcccaggaagaccgggatctcctccaagacccccgcttcacagtgggctgtctactattccccgtctcaccctctttaccatgggccgagccaacagaaacacatccgcgcgagcgcgaccagaatcgagatcaagatcgaaatcgcgatagagaacgagaacgagaacgagaaagagaaacggacggcgttgcccgtacagacgacaacttctcaaccccattactgtccggcaaagccttcatgtcccctttctacgtcgacgccgacccagaccccaactccgcacccgcacatccatcctccataaccgatgcccatctagacaacccccctcaccacgcctacaacaatgccgcctcgcgcctccaccaaccagctacctttttcatctttgcggatctctcgatccgctcggcggggccccttaaggccccgtttnnnnnnnnnnnnnnnnnnnnnnnnnnnnnnnnnnnnnnnnnnnnnnnnnnnnnnnnnnnnnnnnnnnnnnnnnnnnnnnnnnnnnnnnnnnnnnnnnnnnnnnnnnnnnnnnnnnnnnnnnnnnnnnnnnnnnnnnngcggtcggcgggcctctataggctccagttccgattgatgaattggggctctgttgaggatacggggcagtcgatgccgattcttgcggaggcgtggtctgatccgttccgtgtgtatcctgcaaaggattttccggggatgagggattcgtcgattcttgccgaggggttgaaagagcttgggtttgtagagttgaagacgagggggcatgggaagggaaaggggaaaaagaggcggtgattggttcttttctcttctcctgttgtgttgacattatcatccttcgaatatcttgattgttggtttggagtctgaatggctttgtctcgggtttggcacgaggaaaggaaatttgattcgaggatgaaacagggattgcgttcgattatttccttcgaacatgacgacagttctggtatcttactggcattttggtttctctttctgtcgtttcagcttgggatacgggctatatagaagaacagatatcaaccaaaggcccaaaaagaaacataaagaaacattgctatgatacatggtggaatacaggccaaaaaaatttacagcagagatataagtacaacagctctaaaccacctacgcaagcttcaacagcttaggaggcagaccagggttgaatgtccggtcttcccacttatccttcatctccgccaggcttttcttcgacaacgaggccggaagaccctttcgagcagcaagcttgtacatctcacggctcttctccatctcgccatcctcgcgaaggagcaaggccaggatatacccagcctcgttgttccctccatcaaaagcaagctcgtaccaatccatcgcgagcttgcggtatgtcttatgatccttgggttggttgaaaaacgtaacaaccccactcgctatagactcaaagggtttcaaccaggcgctgcgcgcagcattagcatcttccctctcttttgccttcctctctgcttcggtggtaaattggccttgggaggtgaggtaataaaaattagcaatgtaaaagctggctgcaatatttccccacattgcagcgccacccatgaacgcctcgtacgtctcgtacttgttgggggcctccgtttccaacacggagatggcgaaatcagccatggcgatcgggtcgtgaaactccgtggcggctcgcgcagtggccttcaggatacccgctagaccctgttccttttcaatagccacagcgtacatccgccagggcgattcaaatgcgcccgctaacgttatatcctcccacaaggaagggcgtttgctagagggttgcagatatggcagaatctttcgctctagaagctgggcggcttctgcgttctcaccgcgccagatgagcagtttggcatatagcataatcgcatgagggaattcgtctttaagagccaagtctttgacctgcgctatgccctcagtgtttcggtaaatgtccacacctggcgtgctgatataccggttcacgaggtgaacaatggctcggcgcgaatgtgcttttgcgcagccggtcaacgcccattggtagacgtggtggcctttttgaagatctgcaagaaggatcgagattcgataaatggcgtcgacatctataacaaagtgcataatcagtacagaaccatttaatccgtagcgtttcactgtataccaattgaagtctgaactcacctattgagatactccgaacaagactggcggtagggacctgcgagtgcgatagcctgatcaactgttcacccacggacacgaacgtcgccaagttgacgcccggcggtatgttactttcataagcttcatacattttgcgtgcaaattgcctgaactcagccaacgttggttcaacgtgcgcagtagagtgtctattccaaaacccatcacggtctattctaaatccatcttcggtgaccaacacatgctcgggtatcgcattctgtcttcgaacagatggtgctcggcgagaaggcctgacagctgatcgattttgagtggtgtggaagggtcgtttcgatgtagttgtgttgctattggtgacagctcgagtggtgcaaacttgcgcgccgtggtgacgcaagacatgggcttttggagagagaacttgatgtaatcgacaccattgtaacggcaaaatcaatggtctggccatgaaaacgagtgagggaaatcgtgggggtggtagggtgaggggaggttttctctgaagttttggagttcgggaacttcaccaaactgctccgacatttagatctaccaacctgacgatacgccagagtagtatttaaagatatttactgattttaaagataatagaatagcattgatatgctaaatgcatcaattaaccaaacaaaccctctgtaccagacggtctcagaacacaatgcgtataatgtacattttgccttgatctgccaggccaaacacaataaatgctcaacaagatctctcaaaagcaagaatttaaagagataaagagagaggaaaagaccaaagcaacaacatcctccccgactctcttcccaatctatccgctccccgtgcctaaataataacacagcttctactccatagtcgccttggctccgatcgccttgaacgtcgcaatgagcttctccgcctcctccttgggcacagactccttcagaatctttggtgcagactcgacgaacttcttgctgtccaccagcgacaggccaagcatggtcttaatctccttgatgaccttaggcttggaggtaggctcgaaggactcgagcttcaggttgaacagcgtcttctcggcagcggcgggagcagcctcctcctcctcaacagcagcagcggccgcaccgggggcaccaccagcggccatagcgaagccgccaacgggaaggtcggggatgttcaggcgagtctgtgcaaacattttgattagcaatagttcggacatttatgtcaattgagtaaaaggatgatgtagatagagaggtatgcacggtccgcatatcctgcttagaaacccatcgattatgtgtagtttgtcgaacgcaccttcaagctagacaccaggtcggcagtctcgagcagcgtcaatgtgctgatctggtcgacaatctgggagatcttggggttggtagcagcagcaggggctgcctgggtggattcgcatcgtcggctgctgggtgtgcgacgggctgtgaggtatgtagcggaggccccgatgcgcagggaggacgggcggacggagccggagagctgtctagcacagcgggctgcgacctgggtggagaaggacatggcggaggtgagaaagaggcgggaagctcgagagaaaggaaaattagacgaaagtggtggggattggaatcgcggctcgtcgataccaagaccgaaaggaaacactcgaggaaaatctgggagtggcacgtgatgtatagtgcctcaggcatcattgtctatctagcaggcaaacagggccgaagcaccaaacgtatgatcactcacgatattcttgtatgagttctttcattataagatatctttgtagtaatatagaaggagagcagagcaaagaaaaaaatactagaagagaaacgtagtccaatttacaatggttctcgaaaagcgtatcatcgtacgaagatctataggcctcatattatcaaacagcatccagaccctcatcgctcctttttttttaaattagtcctggtcccaatcacctccaccctgcggtggcttggggcctcctgcctgtctcgagacaatgatctggtcgacgctcagcaccgtccgggcagcctcactggccaaacgaatcgcagacatcttcgtggccataaggtctagaataccctcctcgacagtgtccagggtgccgtcagattcgccaatctcaaggtccacaccggtagtccagtgtggttcctcctcttcagacgagctgccctccccctcatcctcggaagatgattcgccaggggcagtggcgcggtggtgcgcagtgtacagacgcgagagaacttcggtggcatctagaccggcagactcggcgagtgtgcggggaatgacctcgaaggcctcggcgaacttgcggatggcgtactggggcaaaccaggggttcggtcggcgaagttggaaatgcgctcgacgagctggatctccgtagcaccggcaccgggcacgagacgggggtccttggtgatggccttgacgacgttgacgccgtcgtcgatggcacgctcgacatcctccaggtggttctgggtggcaccacgtaggacaatggttgctgtacgggtaatagcgttaacatcctcctgacggaagacagtcactcgatcaccgccaatctcggtcgtctctacaacgtcgatatggcccatctcatcgggcatgggggcacccaggcgagccagaggtgtggcaccgacaacgcggcacaagcggcggagctcgaacttggacagaatcttaatgacgaggatattgaaacggttgaggtagtgcatggccaagtcgccaacagtggagccagcaacgaccacacggaggccggaatcgtagagctccttgatggcaatctccagacgatcctcctcgcccgcggtgaagtccatcatctccttggcattcttcaggagaactgtgcccttggtctcggtctggctgatatcgatggggcagctgaaaacgccgaccttggccttgctggccttcttgatggttccatcgggctcccgggggaagaccatacccttcaccactttcgactgttccaagctaccacccatgatcttaacaactcgcacgttgtcgacgttgaagttgacggggttcttgggcagcacagccagaaccgcctccgcaaccaacgcagccaacacgtcctccgtaccagactgcttagcagccaccactgtgcggagagccttgctcaactctgttgccgatcgcatatcctggagtctgtcgacctcgagctctagatggaatcagaaacggttccctcatttgtatatcgacaaaccaatcatgggggggagggggcaaaacataccctctagaaccgacaaggcaaagatctgagccttctcgtatccggaaacaatatcactcgtcttgagacccatacggatcaactcctctgccttctttaacaattcaccggccaacacgataaccaagttggtaccatcgcccatctccgcatcctgctgctgactcgccataacaagcagcttagcagcgggatgaacaacatccagctcacgaagaattgtagccgcatcggaggtcagaatcatcttttgcaggtggttaatgacgatcttgttgcgaccataggggcccagggaggtctggacggttcctgagatagcctggcaggcttcgatgttacggataacggcaccatcttcagaatcgtggctgtatagcagaaaatacagatcagtcaattgctttgcttctttttggaggggcgccagataaggaggtccctattgcggtgggttttcgggcttcccgacttttcgaactcacctctggtacccggccttgaagagccccgcctgggagggacctggaattgatagtgacatgatattaggtcgcgtccggttgagatgcgactggatatcaaatgggttggatgtgagagagttggagctgttgtgccgggcaatttttggagctgcggtggtgggtttgcttggtttgcacgagggggagttgcccagggcttggcgctcagtatagatcagcttacgagcctaatccttcaagttttatatgtttttgctgtatattttatgaggtgtgttatggagatgctctcatgtttattaatacatcgcttaatggtattatacagttaccatcgctctattgatcatctcaaatatgagacatgcgaattataagcagtgtggaaaccaggcactagaaatgttagcagcttagtagatggaacgaagaaaggaaaccttactgtatcctttgatagagttgcatccattctcctcgtagattatgttggccttgtcgagcctatttagtcgaattagtaacaaatagggcaacgcagaggaaacggtcataccatccttgaatagcttccattcggttgtaactctactataagttagtaataaccccttcaaacaattcttcaaacctaccgatgggtgagtggacatgaattgtggaggagcctgtttctcctgttcatacatgcgagcccatctagcaagtatcagcagagcccaagacgatggcccattctatcatattgacttacagtttaacggcagcctcggggttgaaacaggctctggccatcatcactgacaacaatcattagccacataatcgtaagttgatccttaacttcaagggctcatacttagcccgatattgtctgcctcggcctgtagatagaaattagccaagtgaccgtatagcaaaaaaacagacaaaaaaaaaacaatacctcttgcgtccgtgagttcggcaagctatacatgagattcaaaagaaaagaagaaaactgcccggagacatcgaacaagaaagagatagcgaagacagctcctagggtaatgaaactgttgctcacacgctcagccggatgatgagccacaacatgagcaatctcatgtcccagaacagcagccaagccatcctcgtctttgcaaatgggcaagatacctgtgtagacgaataccttccccctaagcgaagcaaaacaacgtcagcgatgtccaccatagaatccaaccatcaacaccacaaacccaacagaacctacccagggagcacaaaagcattaaccattccatcatccttgataacatgaaccttccaatcagcgccctcaatattcacctgcggaatcaaccgctgcagcacgccgtcaaccatacgagtaagaggatggttgtggggcaggatcttcccacgctcggaactgagtacctcgcggtagctctcttcacccatatttagctcctggtgacgagagacacaattgaaccgtcgtcggccggtcatctccactatctccgtgttgtatagataaagtccggatatccccacgccaatcgcaacaaagtggtgcggctttgcattctgcactaagcggaagacgaggggttggtgggtgctgcctcgaaatcggttgtattggttgcgtctttgttggtagggggatttatggcttgaggagaaggtacgccggttgcttgggcaaggtgtgggaaatgagagctgtgatcgcggtcggggttgtcgtagcagagagggagcccaacaaatagacagctgaggccctggggtattgtatgagcgtgacgtttgagctgctagtgaggcggccttgagcttggtggagggcttcggcgataagaaagggtatgcgcatgcgctgcgaaaagcacgcgccatagattgacggagcatggtcgagaacctgtctacctctctatgcaaatgccgagaaggagagaattcaagaacttgcaatgacctaggtaaaccagaccttccccggggaagttgcatgaaggttgaactgagcaacacggcgataagcagccactctccccgttttcgtgacatcggggagcaacgtcatgtctccagaatccccactctactatgaggatatcctagtttcttcttcaaatttagtcttgacatagtttaccgttcctctcagtacatacatagacaggcctacgagttgattcacctaagaaagaacagtttcgatgaggtgggtatgtactaatccaaggcaactcatagattcagtctagcaaggctggatgtatagaaaaagaaaatcaagtccggtaaatcgtcatatgttcaaacaagttaaaaaaccgacagaaccccatcccacccgcgcaccatagccgagaccgtcagcaattacatagaaacagagatgttatgtccaaatacagcggaaacacatcaagaacaaagcccctggtatcatgttgggtagtcatgggaacaaagtggtatcatagggatggcaaaagaaatcgcaaagggggaagaaaaaggggaaataacacgtcgactcggtatgtaaaagtcaataatgtaagacaaaggaaagcgtttcaaaaaaaaaaaaagtcaacacgaagaaaaaaacgtaaggttatagagagttaactccctactcctccgtcaaagcatcgtcgccagtctcgcgccagtcttgggatcgctccgtcaaccgacgcacaccggagacacgctgggcccagtgggcttcggatggagtgcggaaggtgtaggcgcgctgcgaggagatcacaccaatgctttgtagcactgctttgcgtgaatcacgcccgaagactgccgggtggttgatccactccatggacgattccagatctgcgttcagggcaatcatcgtctgagtatcgaccgcggagggtggtgtgatagtgttggtgtcggatgcggatgaatgggttccactaaaggtagatgatttaggagaggaggccaagactggggtgtcaccacggctgtcggcatcgctgtcggaccgggaagcacccgggggcagcggtggtaggccacccttgcccaggcccttgagaatgctgcgcgtttcgctgagaaggtgcatcgcgcgatcattctggccccgagataccagagtgagagcacgggtcagcatgtcggatgttagaagctccatacggcgctgcacaatcgaggggtggggaggaattggtggcgtaggggatcgatggcccttggcccgaggattaggaggcagcatagtaatggccaggagtgaaggtcgaggggagtgcgtgagatggccatcacggaggaggtcgccgtaggttaaatcagcctggatcaatggaacctcttcaacgctcatgactcggctatcatcgccatcagaaccgccgccgagagcctccaatccggagactaggctctcccacggatcctgcggcatgctgtcctgcgtggcattgtcaggctggatgacaagttgaaccaagacgtcgcgtttgtcaccgaatcggagatcacccagtgcagcttctgcatctttaccagttgcacgctttgtggtgtgaagagcgccgctaatcttaacaaacttggcgggtgatccttcaggtaggcggagcttcaacttgacgttttggtgggaggttgtctgcaacgcgcccaggcatccagcaacacattctcgcaacatcatccaatcctttacatacaagtaagatcccttagtacgagtagacaactcaatcatggtatcaggcttatgggtcaatccaagtccgaacgagtggatgttgaccttagcagcttccgcgcgggagaccacgaaatcaacgctttcggggtcggaaatagaagagtcgctgatcaaaaggatggttgagatggggttgttgaatttgcgctgcatcagaagatccatggcgacattggcaccttcaaccacgtctgcacggagacttttttgaccaaccggccgaatcgattcgaggatcttcgaccatccagcccagggcttggtggtcataccaaccaggggcacacctccaccactcgagccaaaagtcacgaggcccatccggtcccgagggccgagattctgcacgaggaatttgagggcatcacgcaggagagtaatcttcaagccttgcatagatgaggataccggaattaccacgacaagatcgaggggaatatgaatagtgttgattgcagggaattctgattcggggttggtgtagtctgtaatggcggtattgatggattttgctgcgccgtaagacgaattgatagaagcctgtcgttgaattccacggttaccacggtagtcatcgtcctccgcccccgagttatcatagtcatagtcattttggcgtgaattggcttctgggtgcaaatcgatcaaagaccgacgccacgtcttcagctcgttgcgattcttgaagcgaaggtagaaacagggcagctcggtgacggaaaggttcaaggagagaacaggttcatctggggacacctcgatggactttaaatgcttcttaatcaaaattgagcccttgagactgcaacgaacaggcttgcgtcgtccggtcgcatcgaattgggggtcagatgattttttctccttcacacagataagcatctctttgaaaagatagcattctaactcctgccaggaatctcgatccttgcccacgcgcatgtgtccgtggaggcgcagcttgccgaaccggttgaattcaagaccgtgccaattgtccacgcggctgcgcaattcctcagccacttcttccatattctctgttggctcatactggattgatcgagcatcctgtccaccacctgatcgtcccgcgtagaccccatccggctgcgattgccccgaaggcgtgtgtcgtaggtcatctaagtccggacgccaattggcatctggcacttcgaccgtaatcagacacgtgagggtctgctgttggcgggatctgttcaaagtcgggaactcgcttcggacggtgactatcggcgcgggaatgggattcttggcgaccttagggcgaggactgaggtctgactccatagcctgtacatcataatcatggcgccgtccagtgctggtgtgctggccttcattgtattcgcccgatgagccggccgcgctaccattccgggagtggggttgacgaggattagaggccacagtcaatcgatctacgcgctcacgctggctgctggtatcacggctatctcgccgactatatgatgaatctctcgatgggttgtaggattgttcttttggtgaggggtgataagatggctccctcgttgaagggttgtagggtggctccctcgctgaagggttgtaagatgactccctcattgaaggtggctccctcgttgagggattgtaaggtggctctcgggtacccgacgtgtaacgactgccggtatcacttggtcgtcgacccaactgttgctcccatggagttggtgttgtcaagccactgcgtactgtagcggtatcattcgatgtcactgagcggacaatattactgattttctctggggacaatcacattagccttctgagcccctctcaaccccgcgcgagggacgtaccgatatccaagacatttccaccgcgacttgtgtccaaggccaatggcgcattgcaggttgggcagtattgaccatcgcattcccgcagaaattcatagaaacaggcctcgtgggagacatgggagcacgagagctgcaaaacacgctcgccgcgtagggtatgctccaagggttcctcgcagacggcgcattcgctcccgacaaaggtccggtccctccgtgtgtgggtgcgatctacctccattgggccggtggtccgtcccgaccttgaatgaaatgatgcccgagagcgattggaatgcgcagattgaccagcgagttccgggtaagcagaattgatctgtccggcgacagtcgaggttgctcttgaccgggtaagatcggcctggttggaaagactgctgctaggtcggtctatcacgcctcgagtgaacgaacgaaatgaacggagaggtgaacgagaggatgattctggctgcaattgaaattctatacgtcaccggtatccggttagcaagttgggacctttcaaggctaatagcagattgaggtcgaagctcaaggattgaagatgtggatagaagagagaataaaaaggcgcaaaccacactcaggggagagtggttcagtccgacctgtcccatgaggcatctagaaccggccacaatagtctcagatctaggacatttggccctagactgagatactggaagagagacacagaacacttacttttgggctttttggatcgacctaggagacccagctcagttagatgttgttgagttgagtcggtcccagagttgtcctccgatctaagtgaacgtttccacatcgactctcaaaggaaacaaagaggtgggggggaaaagaaggaaaaaaaaaaaaaaacaaagcaaaaggagatcgaaaagtaatcaaaaaaggataataaataaaaaaacaattaaagccaaatacaataaaaattaaatccaggcatttcaagaggtaatagtggtacttcgtatacaaagatgaagaaagatggagctgaacaggggggtacacggagtatacacaacacgttttagagtggacacatggttaactgaaagactaaaacagaaagagaaaaaaagaaaaaacaaaaaaacaaaaaagaaaccatggaattggtcaagatcttgggtaggacaatagtcccaccctcaaccatgggtttggaggtggagatcccctgaattaattgaatattttacagtagttggcgctactgcaccccttattatccgccttatacatagtgaacgagtgatatctcttcttattccatcttgcattccacggctccgtgcagagggtgaggtggtaactagtcaatgggtcctcctactccgtaccttggtccttcaatgcaattgtggtcctctcggggtgacatcggatatccgatcggctttacaatccgcttacaacataggggatctgatcctggaatcgggtttatttaatttactatggagcacaaatggagtagtacctggattatattactataactattatttattaacctttggactgattaacctcttcttctgcatcttatgttcttatgctataccttgactctaaatctggcctctgtctgggttcatcttttccatggactctagatacccaaatatttggcagatccaccaacctcggggaattactccagacgttccaaaagaacatttgacatctggatccgtgagtggtgataacaaggttggctagtggatttacttcggatcggattaacttggcatacgcgggactaagtaccaatcagtcacgtgatcgaaagtggctcatatatccgctagtcgtatacccactcaatattggctaaggaccacgcgcctggaacatcggacagtggcaagtttctctgtcgatccaacggcttcccccctgtcaaaaggtttggctctgaagaattatggaaaccggagatttatttttttgtcaggcaaagtcattctgcaatgacgcaatctctcttcaacttcaacccttccagggtttaccccagctccaagctctccctgctgtcggtgatcgacatctggatcatcaacaaaattggtcgggtccggatgtcgtgaacgcagtggcgtctagacgcacctccggagctttgacgatcactccttcaacggactccaacggaaagtttatgtcatgagcaacatgacggagtggttatgacaatctccctagctcctaccacaactgggtcaacgaaaaagcccttggcccaattggtctggctcatcttcgctttcactcctgagctccctcgtcacgtctgcattggactccggcgggtctatcctgttcgtcacgctcattagcgcttagccatctgtgctaggaataggagaggcgaagctagaagaaattggcttgcacatcattgactgtagctcccccgtttatggatcataccggctgccggggtgggtacgcatgttgtctacgcggtgatcgacatactcctgtctttttggatactgcagagcgtctgtgcttactttagctacttctccactgtctcagaaaagccgtctagacacaacactgactactccgtacggagcagtagatgacgattggcaacgcctcccccttttgaggtggaggtttgctattgtatctattgcgaactatgcatgtaggcacgccccttgtgctggtctgcacgtcatcctgcgtcggagaattgtcatgcaggataatcgagactgcaacggaaagtggagttgactggtaacaactcctcactgctcgtccctgagctgtcacttagcatacatatccggctattttctgcattcttacaataatgatccatatcacgatccacatatatgtactttgtacacgaagcgcatagatcactcaacgatcatgaccgttgaggttttcagagcggagacaatgtaaacacagtctaactccttttagcaggttgatcttttctctcctcccaattctgaggtacctatgaaacactggtttcagagtacgagctggtcgcttccttagtgcgttacaagttggaagtggctcaagtggcttgatcccgatgatacagggctgcgatatggcacgctcctagtttgtgcatcgtaagttttgaaaggcgactccctggtctttgaatagttgtatgcagttgagttatttttacgtgcaggtatatgcaagtggatgcatgtacatgcaggtctcattggccgggccgatcccgagacctgatgatctctagcgcataaaagactcaagaccttgaggttttggtcaactttggtaaatgcagacttgcagctccaacgtagcaacgaagatatagatcctttcgggttggctaactcaaagccgacttctatcaaacgtgtgatagacccgatctatagtctactgtacctgaaacagatcgtctatgcaagtgaacgcttcaaatccatgaagggctcctgaacacactcgttctcacacatatcgactcacacaaagtacataacgaggtatctcatggtcctacgcgaggatgtcttggatcctatcagcccgggccactaggattgtctcagttgaatcaacccattatcttatttgcaagacttagcatggccattcgaataaattgtaatataagttaatataatttatatataaacttgagccaatgcgcgaactgatggggacgtagcgtcattcgtcagtccaaccccatacaacttaacgacgtctagcgtttttttttttttggatctatcgctttcgtacttttgcagcaaggtaattttggacatgtctatcgtttactctgtactatttgtgttgatgtttctgacacgtatcttcttagtattagtcaagataatatgacatgtctgttcttgtctttgttcaacggctttaatcgtgcctctgtgatgtgtcgagttcatacttgaaacagtctatacaatgtttggcgtaacaacgctcacgcttgatgcatgggtgtcgtctgattggtacggcagaattgtgttatgtagcccaaagctcctaatcaactctgacttatactagtatggtcagtatagatagattcgaagttcagaataatcggcttgggtggtttcatgatctaacatagagaatgtgacatcaaacaaggtgcaaatcattgttcaactaatgcactggctagttcattggtttttctcatacgacgagctttttcaatcttgaatttgtcggaaacggcatgcttgagcaattgcttcaagaggattctctttatgactatccatggatggaatcaatttcggctttgggtgagtacatgtaggataaacacgatccatggccacactatagaatgcctgaaataatcatttacaggaagtaagagatatgaatgtattgtttcatttgataaagacaagcaaagatcaacccttgcccgagaagtgtaagtgcactttctcaaagctttggcgaagatacatcaggtgctccaaacctcggacaaagaatttgggcatagaataacatgtctaaacccatggagagagaacgtccgccagatctcctcatatctccatgaataagagcccaattcctcggttcatttccctgcatcaaagcatccacagaattctctctcgcagctctgactcgggtcggccggtcatttgcatcatcaggccaatcgactcctccactccgatcctgactgtgcggacttcttcgactctgaccacataacgcagtccatcatcaataacaaactcatcttccagtctgatcaagccttggtagtgagcgctgactctgtgggcgtcgagatcatagaatgcgcaattgttgttaactgaaatcgtgccgtacacgcgaatagttactttgacatccgggaagcctttgaagatattggcaaaggttggtccgtcactggtgatggagtcccagtggttcaagacaaacatgatgtcgaggccgtaggttcggccatacacgagtatgtcggtcaaggactcgaacgagtcactatcaggctgcagaggggtgatcgatttatgaatcaatgggcagtagcagtaggaacggccttccagcttcccatacttgcgcacatactctgcctggagctcaatcagggcggggcgaaggtagtacttcagttggtcagggtcgatacgtgcggcagggggagcgccacgagcaacgaacacaatcaggggctctgcagtagtgatgggggggccgatgggaggaccggtcacaaattctatggcagcgggttccgccatatcgagatcagtgttacttgatggtttgttagatttttgaccttagatagaggtatggtacaataataccttagtcacaccggttcagaagctgatgcagagaaaggaaggacaatgagggggaaagcagcatcttaaacagtaaggctcggcgttcattgctcaacatgcgatgcgtgaacaaactgtactgctatgtggagggtgaataactgaagtcaataaagccaatagagcatcctcttggggtcttattgagctaaggatatagattctgaaaggctcaaaaggattagggagaaggctattttgccttttgagcctgtcaatggttattcctctcaatagtcccgaggttgacatcaattgccttttgatattcatttgggagtcttgtcatagtaaaagcatacatatctcggaatgtagtatatgcgagtctgttcttgtgactgctactgtaattatttatcaggttaggttcatgttgttaatagctcagtcactgatatatcacagccttgtatatattctgctttacaagactatacattgtttgtgaagcttgttaaagacagaatacttcacctataggtattgaagaagtaactagtcctctagaaaagcttgaatttgatattcctatcaccgaagggttgaagttgcgatgttatatagagatgcaccgcaccgtggagatatcggagatcaaaccccgaatagagtccctagaggcagaaatgccagttgttagtcgggaaaattcatcgaatacccccagagacgttgccaaatacaagaagacctcaaatatcacagtattcatgttcagagagcgaagtactttcaagcatcggacccggcctgacttcgctcaccgggcggccccgatctggaagctgactaagacggcaaaagtgaagagagttgttgggaaaaaggtgcatcaccttcaacataccatctccaattcctttacaaaatgctcttccgtgccgcggtccgtcaagctgcgcctttgaggcgtcatgccttcactcctcttgcccgtcgcactgttaccaccgacgcagcttcagctaacgtcgagagcccactgcctgatgtatgttagccctatccggaaaactgaaactgctcaatctttgtagggtttccattgctaatgcttgcgctataacaggaggatcacaagctgttcactgtccgtctctccgatgagagcttcgagacttatgagctcgacccacccccgtacactctcgagacctccaagaaggagctcaagcagatgtactacgacatggtcgcgatgaggtacgataagcatggcatgggatctttgatgtttgagctagccgctgactgactgtgtgttcttttgcagacgtatggagatggccgccgatcgtctgtacaaggagaagaagatccgcggtttctgccatctgtcggtcggacaggaagctgtcgctgtcggaattgagcacgccatcactcgcaaggacaagattattaccgcttaccgctgccacggtttcgccatgatgcgtggtggtaccgtcaagtccatcattggtgagcttctcggccgccgtgagggtatcgcgtacggcaagggtggttctatgcacatgttcgccgagaacttctacggtggtaacggtatcgtcggtgcccaggtgcccgtcggcgccggtctggccttcgctcagcagtacaatgaggagcccaacacctccatcgtcctctacggtgatggtgcctctaaccagggtcaggtcttcgaggccttcaacatggccaagctgtggaaccttcccgttctcttcggctgtgagagtaagtcgtttcttccaagtcttaatagcatcaaaaaagtccgcagatgtactgacgctatgttcttctagacaacaagtacggcatgggtacctccgccgcacgctcctccgctctgaccgagtactataagcgtggccagtacattcccggtctgaaggtcaacggcatggacgtcctagccaccaaggccgccgtccagtacagcaagaactacgccatcaccggcaacggacccctcgtcctagagtacgtcacctaccgttatggtggccactccatgtccgaccccggtaccacctaccgcagccgtgaggagattcagcgcatgcgcagcaccaacgatcctatcgctggccttaagcagaagatgctcgagtggggcgtcgtctccgaggaggagctcaagggtctcgacaagaccgcccgtgccaacgtcgacgccgaggtcgctgaagctgaggctatggccgtccccgataacactccccgcatcctgttcgaggacatctatgttcgtggctctgagcctaagtggatgcgtggtcgtactgtcgatgagactttctactactagattgttttgccctataggcacttctgtgcatcatggaagagctttttaattgttgtgtgaaggctcgggaagatattcttgcgtcgttctatcatttatctgtaatttagcccgatgactgtttcctcttatgtttgtttacttgtttcctgttctagagtagagagcaattgccatcggctgggtccttttcaagttcagtacatcaaattttagcaagtagtcttgcaatatcttcatcaggaattttaaacaagccttggttagcaatatcagccatcgaagatatataggcacgccgtccttcgcagtcgattatgggtatcacatcaaaaagaaataaaaaaagtaaaagtacaagcaagaatagaagggagacaacaagccatgtctagaaaaagtaccaaagcaaggctcaacctacatcaagcaggctcttgtctcaacatttcaagaatcaggtcctgagtccgctgcacagaatccaatttttcttccatcacaacacgttcgcgctccaactcacctcgaaactgagcctgcatctcctggcgtagctcttgcttcatttgctcaatctggatgtgactgagaccttgttcctgcggccgtgactgttggtgctggtgttggtggaatgcaggctgtacctgcgagtgctgtggttgccgggggaaagccagaaccgggggttctggggcagcttgtactaaagccgagatcatgggtgaggcggcactggcgtctatatcgcccccggatgcggcctctaggtgtttgttgagttttccaagtgtttcgatgacggctgagactatacggccgtcggattgtggaattgggggtgtggagggtagaggtgcagtgacttgtggggttgagaacatattctcaaaccccggtggtagtttcagtgagctgatcgcggagacaggtgtagagggcgattcgaggaaatgcgcggggggcgtaggaccagtaatcgagggcgagggtgtagggctggtagccgggagggcagtatcaccgacggtatccgcgacaggctgatgcatcatatccataattgaggtattgacatcagtcgggctagtaacagatgacccagacatgttccgccatgggtcctggtctccattttgagaattctgccgccagggctgcggctgtctacgtttcttgagctcatcgcgctttgcaatgcgtcgattctcggcttcttcccaccgctgccaggtcggaagccaagcatcgacagcagcgagccattgcgggttcatcaattcctcggccgttgagccggctgcgtttgagacccgctgtcgctggtcctcgaggaacttgatgcgctgccttgtgaccatttcgactttgcgccgcactgagtgccacgagtatgagcgcccctcatggacacgcttgaactcggcggcgatggatatccaccacttgcacagattactgcggctgccgaaggtccctgcattttggttgcagatctcgaacagcactatttcttctttggttgtgagacgtctatgctgccgtgaagtgtcaccatcgaactcatcgtcgccgttgtgattgcgcttcgtgcctctgttggtggttgatcctgacatcagccttgacccaactccttcgctggtttgagctacgcccaccggcatcggcgcatagtatagatcgctttcgacgatgcctccttcacgtgagtcacttttgattaggtttgcccctcgatgtgtcccttggctgctctgtgatgcgttatcggtcgtatgtggatgcctcactaccacggactgggaagctaggctgaaccctgagcgcaggtctgatggtactgtcccgaagtaattttgtgagggataatgatacgaaggatggcagtattcgtgtggttgaatgcgcgtcatgagcacagcagcttgcgcggtggccgagcagccgctgtgggagaccaacagtgcacgttgggtggtctattggcccaggggatagtctccctagttcaaaatagccatcaatagggtggcaatagtgtagcagaccaatgcagaaagtccttgtcgatctgtggggataaagataaagctgcgatggatttcacctgagggttttccacgaggcccgtgcgccgagcatagtatggcagctctggctccgtacagtcttgtatctgaggatgagcttcaatcgggtcatttgacaatttgatcgtgttttgattctgcctaattatatgtagctatttgaattctatagttctcataggatttgagtattcatgtgctgcacatttatactttcgcgatgtatatgttggagcttcaaccacctctaggtacctgccaacaagttctgtcatgtcctcacaacttcatgtgaggctctaatagtttttggggaaccagaacttagtacatcaagaataagctgctcgacatatctacctataacaggtaggcaaagcagccaggtctacgcaagggtcataaagtgactggctaatatgcagcatgaaacatcaacatcaataatatatccatttacgacacatcatggctatggtggtacagggggtggggttgacacaaaaagctccaaagacaggcaaaacaggaaccaacaccatggtcaacatgatccagaaatatgcagaaagggaggaagatctaagcgcccactaatacacagatgggaagtttagggggaaatagtagaacagtagagacaaacgaggaagggacaggctaggcagagaaagacaggccaatcgaatcctctaccaccgtctcctcaggtaccagccataagccggagtggcaatggtctcgccgaagggagtgggcacctcggcggaaccgggacgggccaccgggtggcgcaggtacacggctgcacaaatgttctgattgacctcgaggtagcgcgggatgaaggcaaaggcagacatgtattggcgtggttgccagggggtggagtaggtcttgctgttgtcgagaggattatcgcgcatttgagtaagagcgcgcttgagcgtctcgaactcttcgtcgctgagttccgaggcatcgacttcattacctagtgttgcctgcgagaaggcttcggagagtttgtcgcttactgcggtttctgtatctttcctggcggcagccaattccctatctcccttgtcggatgcgaaggcgtcttctggacggagtttcacgtccttattgtctggcttcttctcggcccgcttggccttgagaagcagggttaattgggaaaactgggcttccaagctgtctgcgaggacagtgctggactcggagcgggacaatacgcggcggacagcttgttggaagccacggagctcctgcttgcgttggggcgcgagtgtatccttgccggcagacatgatagacttggcctgtgccataagcgccttgagagtctccttaggatcctccttttcggtctccttggcctcttcctctgcggtctccttggtctcttcctctgcggtctcctttgactccgcctcaacctcttcctctgaggtctgtgccttcgcctttctccgaaccaatcggccctgacgccgctcgtacgcagtcttcgtatgaccagtagcgtacattacgcgctctggctcaacctggaaaaggtcaccggggttgaggagatagctgggatgtttcatctagcacaaaagcgagtcagtaaataaggaatcggtagcttcccacgtcgcatcataccttttgcccgttaacagtgaccgctccgtggatgacgaactgtctcgcctgtctggcactactagcaaagagagctcggaagatggctacatccaaccgacgctctaggggcgcaaaggtcatctgggtgtaaggtgtaggacgtttctggtaagcgggcttgccgcccatatcgagtcctgagccgcgaccggatgaagcttgggaaccgtcatcggcggccaagtcggatgcattcatggggataacactgcggatgcgatggttgaacatgcgtttccactgtccctcgcggacctgctcgccatgataggcacgggaagcagccttagcagaccatttctgctggaagaatgtgcgattgatggtgggtgggctgcggaatcgttgcatgttatacaggttgtatttgctccatgattgacggattttctgaacagtgtcttgttagtcttctgacactgggggaattgagtacagtgtagatacatacgcctttcgacaaagtattggtagctctgttcctcattatggcgattcggtaaacacaatgctgtagaaaatgatatgctttctagtccgaattggccgagtctcaaaacttcagagcacgtgactgtatggtattaatgccttaaatttcaggaatcaactgctggttggattcgatgtttgcctggtttgcatattatgtaaggggatcctcttgatgattggtcaatcaaatatcgcttgatgccaccgccctgtatgaatctgccaccgccccagggaaaaggtatataaggatgcctcccccccgggctcttcctctttttttttttcttcttcatacttaccttgtttgggtgactgtgatcaataagacggttcaccacaggctggtccctgcattgcacatcgcggcggaacagtttgttcaatggcactcgtgtcattgacaggcgtattctttggcacctccattcgtggaatatcttcttttcatcaatccttgagccagtggcacgagattggagacgagtaatgtactagttgatgcgttgtagccacacttatttgtaactaagtgaggccatggtgtcctaagcctgtctaccacgcgtgaaatctttctcgtgaaatgttcaagtctgcccccatacccaatctccccttctctgtgccgaccccgtggggcattctggtccttcgatatcatctctctggcacattcccgccatgtcgtgtcgcacctgccatgcactatcttcttttcatcaatcctcgagccagtggcacgagattggagacgagtaatgtactagttgatgcgttgtagccacacttatttgtaactaagtgaggccatggtgtcctaagcctgtctaccacgcgtgaaatctttctcgtgaaatgttcaagtctgcccccatacccaatctccccttctctgtgccgaccccgtggggcattctggtccttcgatatcatctctctggcacattcccgccatgtcgtgtcgcacctgccatgcacatgatttctttatcacttctcccttcacagctgaaagataaaaagtccggtgaagcattgagaaagatgtctactactgttgcaacttgccgctcacgtttgtcttaaatccctcccactgaagatacgtataccattcctgatctcttgaatgatataaagtacgaaatgaaattgtttggtatatggtacagaaaatattcttaccccctagacaacacatcgcgccatgtccaatgcatacaaatcccagtcgtacaacgttaagcatcttccctatgatcactatatcactctctcctagtacttgggaaagcctccgctaatgagtccgcttcttgcggattagtccattcctccagtagctcatgtgccatatcaacggtttcatcatcgatgcctgcctccagcacggtaccatcacaaaaggccaagcgggttaacacaacaaggtgtttctgtttgctgccaggtacgcatgccagtttctcctgcatattgatcaaggggccgtgtagccgcatgacaccgaaaatcagccgcataaggccattgactagcgcgacacgtaggtctgactctggcggagatgagtaaagtgcatccagctcatcatgcatcgaccggaataaacgagcgagtgcattcgggtgcaaggccaggatcgtactggcatgcctttgggattggcccatagggttgaatgccagtgactccagcagcagtaggacctcgaggcgcattgcacaaatgtcgcatgcagtgtatggctcgacaccttcgtccggtatggcgggctcgctcagcatatgcgtgaggcggtccactatccacttttgtacatccaattggtcctggtcagagttcctgatcggaccaaaagaatctgcacgaatacttgttgacaggatgttcatcaaaagcaaaatgtcacccagtggatgtgacgggtgcagcatcacgagaatgaacgagatccggatattttgccaaaatagctccattgcacttttgatgtgcagtactccacacgcgatttggtaaagtagacgcatggccccagtcgagtcgactaggggctgcagatctgattgtggtgtctgtcgagcaattcgtttatctcgtgatgccggggcgtacttgaagcgaggaactgcattgacttccacggtgtcctgcaagactccaactaaaggtgtaatcagttcggagagtggcacgtcatccgacatcagactatattttatgatagcttcgaaacggggaatcggctcgtagaacttctcgttgatggcgcgctgccacagtgaggcgatcgcttgcgtatattctaatacgtaactgctcgggtcagcatggcccatgatctccataatgaagctggacatgggttgatccggttccgagggaaacgcaagctttgacatggcttcgagatccgtttcttggttaggatgcatacggtgactcaaaagtcgcatcataaatcgctgattgcgacctgcctctgcagacttgcgcttcacttcatcgacatcggccgaaatatcagtcgcatcagtcatgacaagctccccaccagcagtattcagctgtagtggcacagggctatcctggcttgattgccgtttacgttttcctggaactgtcggcgtggctcgcttggaacgtgctgctgacttgctgggcgataccacggcgatttcatcatcgtcaaatccatcgcggagaggaagcacccgggactttcgaggagtcactggggcttccatctcgcgatgcttggatttgtagttccgaagctggtaggcttcatccacaaggtcttgctgaagaaatacattctctgtcgccaataccttgccttcggacatggctgcctcaacctcttgcttgtgtttcgccatttcgtcggccatggatttccgtagagccgctatttgccggtcgtagtcttgtgtcatcgctgcctgcttccttcgaatgatcgagatttcaccggatttcgtttccacttgcatcctcgcatcggctagctcctgtaacatttgttctctttcttgctccatctacaaggattgttagagtttatacaaagaatctttcatctaacccacctgcgccaggcgtgcattgatctccgcgggggcgttcccttgcgcatagtactcgtccacatccatggcatcgcccagctgctcgttgaccgcaaatccaggatctgtagcgagtacatgttgagcatgcggaatgacatgcgaattattgacattatcgtacacctcggcctccaattcccccatctccagtgtattgtagtcgtttgttaacccggtgtggaggcgaggcggcggtctaaacggtccagcattgttgtttaatggtactgcttgagtgcgtagcacggggttgttgtttatggggtttgggcggtactgtgaggctgacgcctgcgttgctttaaacgcattctgttctagttcatacaacttccccggtggcagggagtcgaactcgtcggagccgtagtcgtcgtcgtcgtcttccatgcccccgccatgaatggactaccagagggagttgacaggttccaacttcacggaaggcttttgatcattctcgagttcgagcggttccgagtgtggaagaggagagagcacggcagttcaaggcacctggacaacaaccctgcacatccaatttcaatttctagtcacgaacgtaatatctgaaggtcaaatgatgattgattcattaataaacccgaatagtacaccagatagaaaagatataaaagatataagcaaaaaaaaaaaaaaaaaaattgaacacggggctggagctgaagctgaccgctctcggcacttcacatgagctcatcaacttctaatccgatagtcctctctcgctctctgcacactccacttctattgcccagactctgtttctggccccccctttttgacatcatgtcgaaatctcgccgtaacgttaggtttcaacaccggtcgaatgatgagcgacgccccagcgtgtccgacgtcagcgatgcaccctcagagcccactagccccagcaaaactggcaacgggtccaacccatctacagtaactgaacaggttggttttcagtgggctgtgacctcaggatctaggtctgacatgatcttcacttctagaaacccccgcagtccgaatatgagaagaagaagcaaaccttcatcactcgaacgatatggacttttgtgatgatcgccggtttcttcgccgcgttgttctccggtcacatttatattattgttctaattactggcattcaaatcgtctccttcaaggaagtcattgctatcgccagtatcccaaataaggagaagaacttgcggttcaccaaatcgttgaattggtacttcctggcaactactatgtatttcctgtacggagaaagcgtgatctactactttaagcacattctacttgttgacaaggtgctgcttccattggcgaaccatcaccgcttcatcagcttcacactttacgtcatgggtaagtatctcgattgttccccttttactccactaacctcggttgataggattcgtgttctttgtcggatctctgcagaaaggccactaccgattccagttcacccagtttgcttggacccatatggctctctatctgattgttgtccaagctcactttgtcatgaacaacattttcgagggcatgatctggttcttcctccccgctgcgctggtcatcaccaacgatatcttcgcctatgtctgcggtattagctttggaaagacgcaacttattcagctctccccgaagaagacggttgagggattccttggcgcatgggcctgcaccgttgcctttggttatttcatgaccaacttgctgatccgctacaagtacttcatctgtcctgttaatgacctgggatcgaatattctgaccggtctggagtgtgttccgaacccggtcttcacatcgcaaccttattctcttgaaatctttggcctgaacaagaccttctgggtagcacccattcagttccacatcttggccttcgccactttcgcttcgctgatcgctccgttcggtggattctttgcttctggtctgaagcgcactttcaagatcaaggacttcggcgagtccattcctggtcacggtggtatcactgaccgcatggactgccagttcatcatgggcttcttctctttcatgtactatcacagcttcattgctgtttataaggccagcgtgggtgatattatcgagaccgccatcaacggtcttacggttgacgagcagctcgaggtcgtccgtggcttgggcaagtacttgtataatcagggtgccgtctcagaatcggtatgttcccttgaaccaattaccgtgatcgtcttactaacctctcctagattctggattgccttctcaccgagctcaagcgtcgatgaacttaaaaaattgtacggcattcagattgaaaacaccacacaaatttatgacactcatatttcactttcactctcaccattcgaggacgacttttcaaccccgcgcttcaccctgcaactctcctccgattgcttctgtgccgacgaccccctactcttgcttcttgcttcattcgggacttgatttaggtctaccgaatatgcatgccatccttaatgcgtgcatgcatgatatgtacatacatgcgccccgctcgccttatccgcctttcaacacggcattaacactcaacaaaatgacccgtgtcaagggccctaatgaacggtgtgaatagcgaaagtctcccacgccggaggcacggggacaactttttcattcttcatttacggctgtttccctgtacttttgttcagtactcttttttctattctattctattctattcccttcttttttttattgatgtcggggcctggaccgaacctaaatttgatgactggtgttgctcggtccatctggccaggagctttgctacactcgcgatgcgtggaacagacacatctctttacagaagtggtagaagaagggggggcatggtatgtgtgtgtgtgtgtgtgtgtgtttctggcaaatgtgcctctagtctcgctgtttttggacgcgtcaagacaacaggctgtagatctgtacatggctttcaattcagggtttgaagctgattcttaattttctttcactccatatttgctcctcgagaatgcgttcgtgggtacagcaaatatcgcccactgtgttgtcctagaatgcgaaaccgattatcggtagttgagggttcttttcattgtatctatcatatctcgtcgctggtcatagggtgtctgggtatcgagaaatcgtgggaaagaggatcatggtagaaaacttccagaatgtgaggctcgtgcccgagacaacttagttccgaaactgtagcgcaagaaacagggcgtttcgcctagtccagaaaagtggacaaacacctgatcagaactgagcaaggatgctagcgtatcccaacaagagtccggacgagcagccgatagcgagtcaccgtgaccgaagcattgttcggttgaaactaagatgggatatagtatatggggaccccatcccagctcattatcaagctatcaacccgctatcatattatcggttcacggaaccaagcaaggccttttctggctgtgcttcgctgcatgaggcacgccaggtgccaggaacacacacaaatagcaagaacatcttttacccgtcgacttcatattcttccatttcgaccttgaagtacgccgcgacctgtcgtctttcctcatctgcacatgcgggatcgagcatgaatcgaacggcagcatcacggcctcgctcgcctgttctctggcggtccccgttcgcagcaattggtgttaagggatgggcaggtcgcggagtatcttggccattggcgctagtgccgttgaatggtttgcgtggctggccgatccacgggtggtagcgcgggatattgtgttcgctggcttcttggttgagagggatgcggacttttagaaaccggtctgctgggaattccgagccgacggcggttagtgagcggtggtgggtgtagagttctaagaggtcgaagagggtctctggatggttgttaatgtggcatctaagtggattgaatgcgacaacaatacttacccatgatttctgctcggctggtgctccactgagcatagtctagccccgactccacttgttcgacgcgctgatctaatagtcgtcctgcaagctcaaggcaggcaaaggccatagtcgacgagttttgtttgatgggtgcaaatgtgcggtaaagatccgacgaaatgcggtaggcaagattggagacttcggagttctgtagcagtccataatgccgacctagcttcatgagggtcttgtgaggatgccgggttcgaaagtcaaaaccagaggcctctaacatgagtctttcgagaccgataatgccgcgcgcatgggcttcgaacatctggcgacaagcgttaattctctgtcttgtgtcgtctgggatcatgacttacaggatcatcagccgataagtgctccgagggcgccactttcaagttgtgctctgcgcagacaatgtctcgcgattttttgagcgtatcttcgatcttgcatgctgtgaacaaagccgcggccgcagcatcctatatcccgggttaggctgatctccttgaaggatttccaagtgaactcactgtgaaattatactcattgtctggatgcaccaatcgaaatcggtggtaatatccaactgctgtgtcaaaggtgcgaatgggactggatttccagtcagtcctgatgcattttgcttggcttggagtcaactcacaggttgagggctctccgtacgctgtcgatccacgctacgccctgaagacgcaatgaagtctcgcgaaggggattaacgctcatcgcttcgatacaattttcaattgtctgttcgaatatatatggattggccacctgtataaaagacgggtggatggccgggggtgacaggccagattccagtgttgagctcccgcgaggagactcttctctcgtatttgatgtcatggcggtttcttagacttcctagggatatggcaataccgagcaatgtctttggaagttgcaagatgaagacgcgcaacaagtgactggattgatatatggatcacgtgtccacctaagagctcgcaatcacgtgtaggtctatcgggaatatattattccgaagagtatatgtgtctctaccatgacgctttattttcccgaagacggatgtgcaattaaactaatgctggatatacctgaatagcagtatactgtctcacaaatccctcaagttcaaggaaccccccgaccagcccgtgtcgccttagccaactcactttgagctgtattatccgcatatctcttgtagatgggaaggtaatgcgcaagatcactggtagtctccttgatactccgtctgctctcaacagcagccagccaagtcctccatcggctccaaactccctcatccgcacccccttccccctccctcggaatccctaatccaccactcttaaactcatcaagcacccacagtcgtaccgcccacggagccaaaaccagatctggcagactaatatcttcaccaaggaagaacggtccctcactgtgcatctccttggtccaggctttcaggtgattcaaaaactcttgccgagcctgatccaaccccacatctgcgttctgcccagtgccatctgcaggctggtactgtaggaaacggtggaaagatgggattattcgagatgtcacatagtcaatccagatgcgtgcgcgggcacgctcgtaggcatcatctggcaagaagcggggttggtggtctgggtaagcttcttccaaatactccaagatcactgtggattcgtacagtggccgtgggtgtggatctgctggtgttgagagtgtaggaactaggcctcgcggatttagtgtgagtaatgagtctggcttgttgtatgggttgacctcgatatattcgtatggaatctttttctcctcgagggcaagccagactcgttgcactttattttgttaatattgttacttatggacgagtggctagagacataccaaatctgtatacctggtaagcagttggttggttaaagtatagaggggtcgtagacatacggacagaaccaccccgcatataactttaatggctgttcagcgcgatgcttatcgaccagcgccttggccgggccactggcctcgggatataggttggagtcaggatgagctgacattgtagagtgcaagtgggtgttttcaaggcaaggtggaaggtgaaaaagaatctaagttggacaatagtgtgacatcatatcttaagcatattcgtgattggacattatctctagcgggatattgaaattcaaaaggatagccttgcttaaatcatcagactctagtcttttccatacttcccgatcaacttctgcataatcaatatagcaccagatcgatagcctccaccaaaaatagcatgatgattcagatgatgataccttttggctatatcagtatacttctccaacagcaggatacgaaatactcacaattcatacaattccacccgatcagcatactccgccacaggctcagtcttcggtacaatctgatgatactgatcaaagaaccgagccccaaacccaccaaacatctgcataattccaagctcaaactcgctatgcccatagcaagctgacgggtcgtataccacatccccaggcggctcatcgtgacccgagccaataatccgaccccaatcagcattcccactccacaaatccccatgaacaacaacaggcacaatccccttcccctcaccggcggaagtataccccaaatgaccatccccaagcagccgaggcacaaccacatgcgcggtcttctcaaccgcctcgcgcagcccagcatcgggcccattgcgctcttcagatgtagctaggatcgtaagcagccgttcattcgcgtagaactcaggccagctgtcacaaaaccggttcggctgcttggtatcaccgcagaaggttggtacggggaatccgaatctgtgccggccggtgtccgggtccacaggtgcgggcgtggtatgcagtctgccgaggcggtgcgcgagcgtgacttcgtcatccgtgctgcggcccatcttgccgccgagctggaggaactctgttgcgaggaagtgcgttttggcctttgcacctggctcgtcgagtggaccccgagctagggcttgcggacagaaccctggcactgaggctgctattgcattgagagactcggattcgccttggaacatttcctctgcggctttgccttttgaggaggtttttacaaagtagcgtcgctcttctgtgccatttttggcgggaatctgggcgtggatggtgcctgtgcttgtgaagcctgaacctaatccggatgtggagaggctgacttttgattcggatgggagtgagagggcttgaagaatgggttctggtacgggggacattgctattagatttctggtgttaggaagaatagattttttttttaactagatgcaggatgcagagatgcagagacgcagagacgtagagacgtgaatagaccggattgcaaagggctatgacgtttttactccacatcgagcttttgtcaccatatgaaatgcttacagttcccatgtacatattcaccaagttgtataaatcctatatttagctatgagacgagatgagctcgtcacggtaagcaaaaaaaaaaattatgtccagattttcctacagtagtcctgatccatccagcaacgggtaactctaaccataacaaagatatcagctatgcaggagacagtttgttcagcaaatgcagcgcagtctttgtacgttccctcgtgtctagctccgtgtcatcctcgaggctagccagccgttccgcaaagccaagagaccgaagtctcactgcccgctcccgacaaccttcatgatcgctctgatcctcttcgtagatgaggttgatcactacccagacacagttcgatcgaatgtctttgttataatggttgaaataattgcctagagaccgcagcaagtcacggtggaacgcaacgatgcgccggtggcgtgggtgcccggccgccaagtggatgatgagagcggcggctgcgttgatgatctcattgggaatgtggagggactgactgctggagtctcggcggtgaggcagttggatggtacgcggtcgcagtgtatctgcgatggcatcaagcaaatcattttgaccgagttctttgaatagatattcaatcatctcaggtgcatctcgaccacagatcatgttgcgcagtaagtcgaatgcctgctcctggacggcaatatcgtcctgtcgagactgtgtggtttgagccagagttccgtgcagaacgagtttgcgcctacgtcttgcatcaggaaggaacatgtccaaactcattttggaaggaggcatggtatccgtcatcttgagatcctcgtcccactccactgcatcatccatggggttcagaatatcgacctgttcgccagccgagttggatcgacccatggcaaacccaggactttgatctgtttcctcttctatctcccgtcgagccactgcgcggacgggatcctgagagatgatctccataatccattccgggcccaaagtctcgatgatcttcattctgatgtcgtttgcggtgtcataaaccatgtgcttgagagcccagagcgattcgatctgtaatttggtgttggatgaatgagcgtgttcgcaaaggatgggaattatgttgtgggaaataatcgcctgagaagattatgttagctgcaaagtttgtgaacaaaatatagacatcgaccaacctctttcatgggactgaagtccaaggccaagttacagattgcagctgttgctgcaatttgtacctcgaggtcagaatggcgaagaagggcaaacagtggcttagccacgccggcatcaataagactagtcctaagcacgctcacggatctggtcagcatccgagctgtaccacaagcagcaagaatggtcggaatcgggtttccgtcctctgcagtatttctgggcattggagcatcagctggtgcatcactaggccttggcttgagggcgtcaatgatgtaagggactacgccatgttcgcaaatcgccttgcggtactcatccttaaatgggactagtgctgccaaagctttgagaatgttctctcggtaacgcattacatggcaaagggtcggagagtaaccggaaggtccgagccggcactcttgtggaagagactcaatgtcccgggttgggctactctctgcgtgccacatcggccgggatgtctccgtgattgggttgtaagtctccttgagaagttgggaaagtcgcttaagcgcattgccttctactgcgtgtctctgcaactcctggtcgtccatgaccaagttggctaataccgcaggcgcctcttcctttaagcgcaaggtcgacgagagcagcccatcatgaacagcgccttcttcatctggcagtcggacgttcttgtcaagcatacgaatcaagatgggaatcaacaaataactgaacattggaatgcgatgtttcttcgccaatcctaaccggaagagggccgtaacaagacgggcggacatcaaccgtgtcatgccattctctgatcggagaatgcagagcagccatggcacaatcgaattctcctcttcttctgggactggtgtctcagcaagtgaaaaaggcatggggtaggaatggctgtgtcggcgctgtgagcccccgtgtcccagaggtgggaaattggcagaactagatgattttgtgtgtgttagaggaaccgacggcaaaagctgttctatggggttggagccaagatgacggggtactgcggagcccgataaatatgtggatccccagggagctttcttgatatctgatggagcgaacccagcaacttgttttggaaacaccgtcacaattccaggcgatgacaggaagtgctctgccctccatttcgactgttcaatgatgacagcaactgcgcgcaggatcggtgctagctgggcggattcgggggccggaagtggcagatcctccaatgcaccaggatcttgaaggcgatcctccgcgccaggcagaacatatccttgggccacaacaaaggaggcaatcttgagtgccaaagcatccaacaccccggattctgctagtgccgtcttatgggtttcctctgtgcatagcttgccgattagagccgctgctaactcgatcgtggcctgagtacgcaggttcttgtactcctgcgagattatacgtctaagagaggtaatatttgcagaagcaaaaacaagatccgcaagctgtgtgtcccgaggccattgttcctggctttgcaacggtatccggtctgcaattgtgttcagaagccgtaaaattggaagacagaatgaatctgggcaatccgacgaggaaaatattgaaagcaaggtctggaggatattgctcgcgaatagtggggtgagaaacgtcggaccacctactcagtaaagtcagtgtctgtcttggcaataaggatctctagtcatcacgtaccttgtgccaaactcccaacaattaaagttgcttgaaggcatgcttcgtaatcttcgggggcttttggtgtggaccggccttggtgcaatatcgattcattaaactcggccgttcccggccatctcgaggtcagtacctgtgccaaagctggtatgattccctcgaaaatgtaggcttccttgcgctggtcatggccaatcaattcgttcttcagagtgcgcaaaactgtaatctgagaggaggccgattcggcactctgtagctgcagcagaatcggcggtgcggcagctcgcgtcatcttctagcgatcaccccctcccaacgggaggttctcggcgtttcactttgttggatcaaggaattagtagagaaattaaaatgaaattgaggaaatgatctccgttgatgtgaagcttgtgtagacctggatgtacaacatagatatgatggcagaccggaactgtagagccgggcctagagatactccgcactttggttctgcctacacacaccgttccagaaaagtggtcccggactaatgaaggagcgacaaccttactggtctgaggctataaatgtttgtataacgacactttgctacggaaactgaacattctgactgcttctatattaagatattctgtcaagaaatgtcattgccgagtatgatggggatagctagaatctaaccacacattggcatgatttccatgattgtttgcctttccatggaatctaagggtatgtattaggagtgtatgaatcttaatccatatttgcctgggtattgagatctataactagttagttatgtgtttggtagcctatattgtaaggccttgaccgttggtatcagtccccatctacatacagcactgcagccaatccgatatactgctggtttgaatctggggaatcagatattggcacgatgtaaatacaaccattagctgccatatacctatataggatctatatctatatatcttgatatctatgtagaactgcaagatatcacaatgtattctactaattgtcttggcactctaacccaatccagctagagtacggcagtttcaccccgcttcccggggctcggtagtagattcagttgattcccgtctgctccgtctgatccgtcacatccctgtacaatagatagaccgctacacaacatctagggctattaatttgatcaaaaagactgcgatccttcgctcgccaagatcagctctctacgcacctctatatacatacatggacatctagacagaatacaagaaaatagaaaaatacacatactgtaacggtacagtcaccggaagcatccagccactgacagcatggatctcattacctcacgaactttgaaaagaacaagattttcaaccggcttttgcccccttcctgttctcttgtccaaggccattcggagtgttcttcccagatcattccccctctttcctttggcgacatttggtttcataccatcgcaatcccttccgctttccctagccttttaagcctctgaggatgagggccggccgtgcacccacgccatccacagcgcgccctgacagtgcgcccacgtggtctcacctcgcactgtgaatgctcggattcccttcattccttaataacctagtcacaccctaaaaaactatgttggcgtcttcgccctcgccttcgacggctgcgttacgctccccgcttccttcaacttcggggtcgcattctcattcccactatgagccgactggcgctccacaattcaatagtcctagatcctcgcgtctggccatcgacgaacttcgctcagccttgaatcggcatactgtcgatccttcatctcctgaagtttcaggagatcttcaacgcaggcgcgcatcgacatccgacactctgaagaccctggtcaatcattcggccttggcttcgacaccccaatctacttcttccgccgtgactgcaaccaccccggcgactgccccatctacaaacccacccccagattcttcctcccccgctccctcgatgcccgccccaaccccgggctccaacaagcgcaatagccaacgcgaccatcactcatcggatgcgacgccggcggaatacgatggcgaagacttggaaagatcgcagtccaagcgcctgcgaccttccaaaccagaggtcaagatgttgcccacgcaatatgaactggccgaccctcgtgacatggtcgtgctgatctctagcatgctgatggagctgatccgtttcaacgacaagatcccactacaccagggtcgtctgactcgctttcactcccgctctccgccccgaatctccgtgcaagattacctccagcgattgacaacccacgctactctctcacctcccatcctcctcagcatggtctactacatcgatcgactctgcgcgctgtaccccgccttcaccgtgtcgagtctcaccatccatcggttcctgatcaccagcgccaccgtcgccagcaagggactcagcgacagtttttggaccaacaaaacgtatgctcgagttggtggaatcggtatgacggaattagccatgcttgaactagatttcttgttccgagtcgaatggcgcattgttccacaaccggaagtgctggtggactattaccagagtctcgtcgatcgatgcgaagggtttgaaattgaaggcgtttgccagaatggcagtgctaaagctggggtaacgggaattgccccagcagccggtcctgtttcaacataaagctggattgcgcccaaatacgccgatgcaaaatctgcacaaattacgttctgccctggaccactcgggctggtctcgagtcagccatggatgagtgggttcttccgcctgtcacccgccgagccactggcggtgtgaattaatacataccacttgcattagggggggtgatggtgtctgatctcgatgcaccattgcttttgatttaatatcgaggagcacaggcatcagacacggcgctttagaacagggatctatctcagcatataccaaaaggtcaatgggttgtaccttgttcctacttttcagcgattttttattttacggggcattcggcgtttgatgtctcacgggatgatgaggtgatatctatggccttttgtcttaaacgggtatttttttagaaccatacaaatctcaaatatcgactcataatctgagcattttaaattgtagggttggaaacgagatacatatggagcaactatcattatggagattcccatatacttctatgtctagcttctcgtaaatgtatttgatcgatgttcatttggagagtaaaccatataaaagaccaaagcgaactagcgtgagatcatgtttgcactgtttgcttactaactttgtatagctttcttcttttttccaagtcctcatgtgaatacttcctctttggctgaattattcaagtcgatgtcggcgattgaggcttaatgcaagcccaaggcactttcagttacaatcgcttttaccctatgacattggttgtacattgtcaacctatcctgcaacattctatctcaccccgcgcctggctgggtgccgtttgagatagctagaatggacgttgaaaggacaatcagaggcctcaagccccttgacgggcaagtggtccctattcgaacagtccaagagacaaggccccaagaagaattcggtatgacctacaatatcgccctcttcttgcgacatcatgattaaccaacaagtaggcgatgcctttgtcgcagaagtcaatgtgaagtctgcatccaaagtgatcaagtaagctatggactcccaagtttcccggtttaaactccatattaatcctcaattagggctatcgacgcggctttccccaaagacccttcccttccgctatcccacctccgtcgtttcgcgaaaaaagaattactcccgccgccgctgaaggcagccattgaaagccagagagttcctctaacggccccaacacaaactatcttcgtcctcatatcaccaccactgcctgatctcaccacactcaaggctctgctcgctccatttgcgccgcacacggcgccggccgctacaaacgatcctccgactacgaatgaaacgccagacgaagcttcacaatccgatataccaacccctactattcaactttaccctatcaaaattcctctttgcccccccttcaacacaactcaagccgaaacatggaccaagaccctctggccagtcatattcaacccagccgcaccgcgctcaactgtcgcgccgcctcttcaaaccctaaaacgtgtacaagaatctattgaaccacgggcagggtaccacctatccctagcgcgcaaagtagcagaggaagcagaacaatccgggctaggccgcggcgtaggcgcggtgatagtcgaccctgccatcgacgaagaactaaccgcggcaggctatgaggccggacatgacaccacgtcacaatgggacgaagcagtcctcgcggttgccggtgatgcacggtactcccgctccgaagcgcttgcaccatcacaggcccagctgcacgccggggtagcgccaaacccagcgagcaagatatatgacgcggatgtcgagggcgggcctgaactgcacgcgctgatgcgtgctgtcgatctgattgctcgctggcggcgagaacacgatcggtttgacgacgtgtcttcatcaacgactactacacatccatcgaagccagaaatagaagcgccagaactgagcgccttcgaatcatactttttataccgtcaccgtcctacatccaccgacatctcaaactcacctcggtctccgtcctccacattaaagagaaagcacgaagtccctaaccctgaatctgacttgagtatccacccctctacagacccttcccaatcccacgtctatcaaccacctctccctgctcctcccccatctaccgtggtatttgcggattctgctgctccgactacaacgccagcagccccgcgcatccgcactcgctcgcagggtggctatctctgcacagacttggacgtctacctttctcatgagccgtgtctgtgctgctctatgggcttgcttctgtcccggttcagatctgtcatcttccccagacgtgggaggttagcgagtggtggcctgtcttctgagccggttggtcctgtggccgatgagcttgatcaagccgcagaggctgatacctctacggttgataaggagggcgaaagaggttactacgggctgcattggaggaaggagttgaactggagggctcttgggtttgagtttgtggaggatggggatgtggaaatcatgggcgaggctgcaatgcctgtcttccatgcttgattgcaaatcatccggtataacctacatgttacataaataaaccaaacaacgtgttacaattttgaatacacttgagataaacttcctttgaaattttttttttcagtaaaaacaggctttttgacataccacacctggtattctgcgttctcgcgcaattcaggctgccgacctgtaacctccactctcttccaaacctccaacccattgtggtctgcaccattaacctccctcctcttccctactaacacgagcaagaaacgccccgacacccgaggctgaacatcaccaaccctcttcaacacccttctatgcagacaaagtaatcaagatcaagacaaggaaattcgggacttcgtcacaggatctcctgtatccacgccagatgtcaaatgacatggcaaagtacataaagaatttgataggaacagctcatggaaacccattcatctcggcctggtcatgtgcgagaaggccaagatggatttgaataaggtatccataagaaaacggagaggggtataaaccgaggtcaatatccctaagatacagcccaaaggtagactggaaaaaaattggctcaaagacaatgagttatggagtagcaaatgattcggattcgccacactgaaagaaaaggtcaaaaagaaaaggtaaaaacggagcccgggtaaatgcttttgtgaagcaaaagtgagatatgatgaagaagcctttgggtagagatgtggatgtcaaaggaccgccgtgccctatattgtgttcctctctccagatggctctattgtgaacggtgtttcatgtgcagagacgagctgtaaacacaaaaatggaacgagctcgccgatagatggatgttatgtatgacctgtcaatacaggcggcagataatcctctggagtgaggatcaatatgcatgactttgtggaagacacaaaactcgatgtgtcataggatgtagtgggtatgatgctttttcaacgcgtcgttcaagaagtgatgcccagcctaatggcgaagcttttggcgacaaacctcaatccatccgctggtagaacaatagataggccactttgtcgtcccgagggccatagcggcccaggggagttcggaccccagagggagcggcaggaggtggagtgactccgttcacggattttttgcttgcatgtccgttggcaccattgccattgacctggctccagcccttgtcgctatcagttaaatccatgtcatcctgatcaatgtggtcgaaaatattgccgttagggatcttgccatgcctgtgctgctcaagggcggcagcaagaaccttagggtcttcctcgccaccagcttccgccacttcctcgctgcgaacgcgacggatggcagtgtcgtccatgcggatccattccaagccttcctggcgccgaacatcgactgtgtagtgaccaccgctggcgttcttcccgtgatggtaaatcacacccataaggcgatactttgggggacctccctgggatgccatggcgttgcgccggtgagctgggaaaacctctcgcggaagctccaggtctaggggatacccaaccttcttccaaatcttctgggtggcacctgtgacactgtcgtactggaagcgcttgagatgaagaatgaggacaggaggcaaagtctcaatgaaaatttgtttggtcgcggttatgttgggtccgcgcgacgaattgaaatcaccctggatgctttccggctttgtcattcccttgagagcgtcgagaatgttgtgaacgtcatgagacccaatatcgagttgcaaaggttgatagggttctaatgtgacagaagtcttgttaccaggcaccttgaattctgaccgaagctttcctccgaagattctggtaaccggcgactcagcggcaagtgagccagacagttgggtgaccgctgctttttgcttgtggccaacttctaaccagccgtcgataggagaatcaccgccttctttcgctgcagtgtgcgtttcggcacgagcgcactcctcgtgcatctcctcgagaaggaagcctaggaactcttgggcatcctgctgatgtccgcgccgcatgtccctgaatcgtggcagctgtcgaaccatctcataaacaaattcaggaacgaaagagtcgccatattgctcaagctcattgggcttcaatctgagacgaagttggtcttcggaagtggccgcgtcaataacacggaattctttcatgaacataatcatcgcatcgatcaaaggaagatcgctgtggaaagtgtgcgcagcacgtcggccaagatgatcaaggaactgatagaacggggtacagaaaacaagaatttgcaacacagaattcatgtagcacatgtttccagtgtttaccagtcctcgaggttcaaggaacgcaatcttgtcgctgtattgagtgacatcttctcccaatttgctcaggacgtctgcgagtgatttgtttttctggataggcaatccgtgtggctcagccaaagcggccgcagccgcggcgcttgctgctttcgccgactccttcgaacggaccaaatcagcccaagacttgggtgcagctagcacaggcgagcttgtcttgttttctgtagaagaagctttatctgattctactactggggcaggagtaacaggtgcagtcgatttaggggttccagatgcgacgctgccatctttggcttggcgacggggggtagatggtacattgggcaccactggaataaccggagcaggctttggaattttcgactgtgcttgcgaccttgcaactgacgaaggggtagtgggctgtgtggagtctgcatccgactgttggaatgtcgtggttgttggggtttgaggttccgaaaattctcgcgtggaagaacaagatggctgagtctcttcgttttcatcgccttcgatgactatgtgcgtatctttggtgggaagctcaactgatgattgcataacacggcccttgcgacgtctccgcggggttctagccgggaagggctgctccggaacagagagccaaggaatctagactacctgttagaaaagtattataattcgagatgagagtaaacgcttactggtggggcaaaagtgggcttcggcggcaggtttgactgtggctcccatcgtggtggcggagaagcgataggatacccctgggccgagtggggtagaacagcaggatattcctgcaattcgggctgaatgggctgaatcgatggatgcaggacagacggagacattatcggttgcagtggagtcggagttctttgatgcatgggcatcgaatgaggaatatgcgtgggcgccatgacaggctgcgagtggggatatgaggatacaatcatcggtccatagggcgcctggtatggacgtggaggcccctggatatgtccatatggtggataccagtaagggtattgctgcgatgggtatggttgatgaggcatatggccattcatgtgaggagggtatcccatgtactgtggtgatctcatatggggaggcgcggtattgtaagaaaagtcttgctggcgccttgaaggaggcataggcagctgcccatgcggcatggcagggaggtggtggttcatcttgagctagctagagaaaaaagttgtcttgacgttcggtcacgcgttgcctcagatgagtgccatgcgcgatagcagtcaagaggaagaaaaaatctggagatgctgtcgcatttaggcagccatcgtggcctcggtaagaggtgttggatatgttggatagttggagtgaaggatgaactgcgtcgaaagagctgttggtgttgctgggattggtggaaggagactggcaaaccagatcggagtcaggaaacaagagaaagagatcgctgtacaagtaactccctaggcggagagagtcaacaagtgggtatgagaagcgagtgagcagaaggagagaaaaaaggaaataagagacaagggttaggaggcctcgattcaccgtcaaacgaaatgaagctgaaggagaccgagaccgaattgggtgtcgggactacggcagcctctaacccccagtgcgccatatcagattctgccagcagtatgcttcgtaatataagtattttatacgtttcaatatatcaatatcacaaaggcctctatataaggtaggaattgaagtctaattcttaatgtttgaattttcctctactctctacattttatccgtatatctaggtgctaggcttatcatgaatgtctaaagtagaaattgtgtgaaaatcaagaactaactaccccatacggagttcgtaatcagtaagtaatgagatctggcggtgaattaggcggtcaaaatttaatataggaaaatcgccgggacttgttggttcacgtgacattacgatttgtaaccggagaggggcgaaaccgtaccttcacgacatcaactggcaccctgagggccgtccctcgatcctcactactattcttacatggcctctagggtccttcattctacttcacctcttctggtccaatctgaggcatctggttgatcactcgatctactacccgctagctgattgacatcttatcagttattggctttatccagagtctcccatataacccctcatcttctattcagccaactggctcgcttcgtctttctgccttgtttagtctattgcgctctcactgttgcaggataaataccgcataccgcagagatatgtcatccaatgcaggacagaacctgccctcttccaaagcggtaaacattccgaatacagcctcgtctactccatttcactcaacagctccagcggacaacagctctcaaaagcgcgtaggaggccctggaagttctcgaccagggatgtcatcgaaagcttcagctaccccaaggaataatcaagctcggaagagtcaacataaccgtcaaagaaaacctcggctattggatgatgacgagtataacgaatcggtgggttcacaggtctatctcctcaagagctgcctgctgaccccggagcccctatctaggccgccatgaaatccaccaccagccggaagggacagacgtccatcactcacttgatgaacttttcacttccacctcgcccacaataccaagcacctcctcgcaacatccgacggtatacatcatggggagcgggcgcaatagacaaatcgcgttatgttcatgcgaattatcgctttattgtgatgccaaatcaaaatttccatgctcaggcagccaatgccgatgtccatctcgattggacctcggtcctccaagtgctggtatctgctcaaacacaggctgccagttgtccgatctgtctttctactccagttgcaccgcgtatggcacggtgtggtcacatattctgcctcccatgccttatccgttacatgcactcatccgacgacgataatacggtccctgaaaaacggcaccgttggaagaaatgtcctatatgttgggactctgtgtatatctccgagactcgacctgtcaggtggttccgtggccaagaaggcgatcttcccgtcgaaggcggtgatgttgtattgagactcgtaaagcgtgagtcgggcagcacccttgctctgcctcgtgatgggtccgagacacttggtccaggtgatgacgttccatggtatcacgtggcggaagttgccgactatgctcgaatcatgaaaggcggcgaagactatatgaccgctcaatatgatactgagatcgaagatctccgcagacaggaagtcgaagacgagcttctctttggtgatgagaatacttggacacgaaaagcaattggttctatcatggatgccaaagagaaactgaaaggcattggcaatccgcctgaggttcggccagccaaggaacgcaatgttgcacctacgccagctagtcgctcttctgcacactctgttgtggcgccagcaacatcagatgaatcggaccatctttctcgaaccctagacgacgtccatcttgatcctgaatccagtgccaaagctaaagagaaaggccgcagcaagcaaacgtcagtgtcttccgggccagatcaaccatatcatttttatcaggcattgcctcagttctatctgtcgtccttggatattcgtatcctcaaggctgcattcggagaatattctatgttccctgcaaccatcctaccgcgagtggagcacatatcaacaggccacattgtggatgatgagcttcgcaagcgagtgaagtacctcgggcatcttccacaggggtgtgaagtcagcttcctggagtgcgattggagagacgtggttgttcccgaggttttggggcgtttccgcgcagagactgatagacgtcgaaagcgtaaccgggaaaaagaagcccgggaagaaaaggatcgtattcgcgcggagaaagaggaggacgacaaacggtgggctgccgctcggcgcaagcggccaagcattggaagtgccagcctcagtgaagccccattctctgctcatgacttccaaccacttcctcgcaacgtggatcctacattatttgatgctacggcctcctcggcctctcctccgcgctcatcgtctggattcggggcattggcttctccttccaccagtcccccaggcatccgcactgtttggggcacaacggcagtgggttcactgtcgccaagccttgaagctcaacgagctgtacacagtgacgggtggcggcagggctgggaggacgagctcttcgcccagcaggaatctgatctgctcgcccagacggcatctggagaccaaagtcaaaatcccggaccatcgtccagtgggggtaagaaaaagaagaaaaacaaaactaagatcactttgatggccactagtagccagagaggggcataaatcttgatgaagccttgcgtgtttcacttttctcaattgctattgagctcgtactgcattatcatagttatgtatatgatccatttccccgaatcttcgggttgtcttaatatgtggttctcggctgtgtccgtatgctatgctactgaaataccatctccaggatactccttgagtacttctaaagccttggtataatccatgctactgaaataaacacaattatatttacatttcatatacaaggaacattatgtatatctgtgatgtcttctccgaagcagagggaaaataactgttggaaggttgaagtcagaagaaataaatgaattattcaggcaatattaaataactagtcaactccgtacgacatagctcaaatacaataaggggtaaattgcatagatctagggcttcaaaataggcagttgacaacgagctccccccactcaaccaccaattctccctaaatggtaaattgccttttgtggggggaaatactgcagtaccctacatagcactagcgactggagaaaagggtattctgccccttttagtatctatggagggaaatctacaacctgactgctatctgattttgaacggatatactccgtagatgtaccatatatactactaataccgttcacgctctactactacgcctatcacaggacataaaatacccccttatagacttatataccagatcaatacttgggtatcttgcagattttaaaattgtttcttatgtaatcattcagaaccggggcccgcaaagtaaacagtcagggcattccagttttttttcaccctcgctcctttttaccctcagccattcctctccttgccctcaattgcagtcaattgcagtcggaaccttggtcttccgattaagcgaccatgactttaacccgctcgcaaacggggaagacccctaagtgagtagttcccaccggaatctagttgcgacgtatccacaccctgaatcagggtatatcttgccaatacccggaacaactggcctgttcatagtaggctttttgtcaagctaatttggaaccctttcttcctccagaaaaatggatcgtcccggcttcgttgagacccccggcggccgtcgtgccacccgcaacagttctgtcttgggaagtagcgagaatgaggcctccctctccccttccccctctctctcgagatccaaatccgcctcccgccgtcgtgctgcagtcaaaatcaagaccgaggaggatgatacgccggtgaaggtcacgcccaatggcaagactaccgacaccaagcccgagtccccatctcgcgtgatagacggttgggaggaaggcctcgatcccaaggtcgattatagcggacactttgaattcggtggctccttgggtgtgctgtccatgatgatcggattccccatgctcatgtactacatgtggattggtgccacctactacaacggcaaattccctcgccccgcggagaacgagagttatggcgactttttcgcacacttggtcgatctcatctacaccggtgctttcccatcggtaaaggcatggactatctactgggttttcttcatcttcgagggtgcttgttacgtgctgcttcccggtgtaagtgtctccggtcgacccctgccacacatgggtggcaagcagctgccatattactgctctggtgtgtggtctttctacaccagcattgcattggcactcattgcgcacgtgactggggttttcaagctgtataccatcattgatgagttcggtcccttgctcaccgttgccatcctctctggatatattgtctcattcattgcctacttctcggctttggcgcgtggcgcagagcaccgtatgactggctacccgatctatgacttcttcatgggtgcggagcttaacccccgcatgttcaagatcctcgacttcaagatgttcttcgaggtccgtctcccgtggtacatccttctcggcctgtctatgggtgccgcggcccgccaatgggaaatgtatggttatgtgtctggcgaggttatgttccttgtcatggcccactacctttacgccaatgcctgctccaagggtgaggagtgcattgtttccacctggtaagagtatctcctgccccagaatcaagattatttcctaatatttcatagggatatgtactacgagaagtggggcttcatgctgatcttctggaacttggccggtgtgcctctgagctactgccactgcaccatttacctcgccaatcacgaccctgctgaataccgctggaaccgctacttccttgccttcctctttgtcgcgtatctgtttgtctactgggtgtgggataccaccaacagccagaagaaccgtttccgccagcaggagcgtggtactatagtcacccgcaacaccttccctcagcttccttggcagacagtggagaaccccaagactcttactgcggctgatggctccaagattcttatagatgggtggtgtaagttcaagacaaataacaaaaatctacaagctccaatactaacaaccgtatagatggaaaggcccgcaagatccactacacgtgcgatctttacttcgccctgaactggggcttgattaccggattctcaagcccattcccttggttctaccctgttttcttcgcttgcatgatcagccaccgtgctcttcgtgatatccagcggtgtcgtaccaagtacggcgagacttggcttgaatacgaacgtcaggtgccttacctgttcattcctgtgagtaacttgaccttgaggactctcccagcacctatgtctaaccttgtgtactctagtatctcttctaatcgcagcccgctgctttccctcggagtcattgagacctcggtagttgagaccccaggggattcttcttttacttctttaggtccgattagaccatcattctgccaaacaaccttggtgtaacatgtataaacaaaacgtcaaatagattattaatatgtaccgatcatgaagcaagatgttccggccatcctatgatggcctcttgagttattttgaacccaccctgtgacttttttatgactttttgtacgacaagtcatcggattccgaagttgatccagatttgaagacagtatattctattcaatttaatgtacggagtacaattggtgcattcaagcaaaaccaaagaccaaagacgtctacttcgttgagatgttggccagtatcagcacatgactgccccgcgtgttatcgataatgatttcaccgtcaatcgtctgtatttctacggtcgtttcaattggtttctcaattctattccaatatatttctatctttgaaagaaactaaggcaacatgctgatccaagaatcctatcatgacgtccccaccaaagcggatggacaggggacaatgcgtatgtacactatggtcgctctcgtacagcacatttcttcccgctataacgccattgctccttcatgatgtcaattctaacaatttccaaggcatctatgtcttccatccaacaatcccaggctaccccaaagcccgcttccctggagtcgtagtcttcagcgagatctatcaaggttcgtgtgctcttctattattgtgaccatgtcggaacacctcaactaaagacccgacccacagtaacgggccctgtggcacgctttgcacgccaaatcgcaggccagggctacatttgtgttgctccttcgagctatcatgaattcactggtccggaacctctgaagtatgacgcggaggacacggacaaggggaatgcatggaaggttggcaaggtaagcgaaataagacagcttccatggataaattcattacttgtgttttctattcttgttctttattgggctatacttgtgattaatctcaagcgctgagtcgctgactgtctatcagaaacttgccgcttacgacgaagacgctagtctttgtgtggattatctgctctcgctgcctacttgcactggaagagttggtgccacgggcatgtgtctgggtggccatttggcctatcgttgcgcgctagatagccgggtcaaggcgagcgtgtgttacttcgccacggatatccacagcaaaacccttgcccgaggcaagaatgatgatagtttggagagagctggggatatcaagggtgagatgctaatggtatgtatatatttccgttgtgtttcgtatgtgtcgatcgctaaaatctccagatcttcggcaaaaacgataaccacgtcccgcccgagggacgcgatctcattcgcaagaccctccatgataagggcgtcttgttcggtttctatgaagtcgcttgggcacaacgtgagttgaacacatcgctcaccctcgagcatcaatatgctgacaagaatacttatccagatgcctttatccgtgatgagctcagcaagggtcggtatgatccagctattaccaaggtctgctttgagatgctgcttgagctgttcgggcgcaccttgaagctggatctgggcgatcatgatgggcaaaaattggtgatcgaggatgtatgttagaggagcattcgagtacctgtcaaacttctcaaacgaaggtgctgattcgctgaaatcggacgctatcaattaatttccaacggggctagatcgaggtcttatagtaagtacatatgaatactccgtagaggtacagggtaacgatacggcactgcaggcgccaaacaggatgcatatatatcctgaacgttggatcatatgttgtatgtgtgtacgttcactaaattgtgggttgagtccacctggtcgacctggcgaccatattattgtcctccggcaagggtggtcaccacttatccctaaaaaaagaagagaacaaaaaaaaagaaaacaatatcagcactgggtctagggagatctgtacgtatccagaagagtagaggaacaaggactgtttctaccatatacctccgggcgagagtactattattagcgactggacccaaggaagcaccatttcccacgcttcaatttccaaagttcaattgttttgatccgattggaatcgcattcgagtcggattcgagtcgatttcgatcgaaattcgtcccgaaaaaacttggaagttcagacgaggttttttttcactctaagccactagcgccagccctgtgagtcccccgagtaacctgtggaaatcagcttgaatcatctcttatttcccatcagctcgctattcacgctgcacggctacacagctatacagctacacacggtttcatttctctacttcttcaccttcaaaacaacctggttccactagagatccaccgatctggactggtcctccacgcgggtcaagacgccaccccagtctgaacactctttgtcaacattgcctcacgcctattctgcctctcatttgaaatccccaattcaaaatggggtccactcaattcgggaaatttcacgtaagtgcggatcgattctggagaccgacctcctaatgggcagatgctgaccgcacaccctgtatgggtaccacaggacttctgtcgcgactcgaccctaccagtttgcaatgtgagtgagatcgttctcaaaattccctataatggctggaatgtcaactgactgtatcattcgtcgtgtacagcttttcaccaatcaaaccgcaactgatgccttcggcgcgtgcgatctgaccggcattcctctcagtggggatagacaccttcggaacttaggtacgatctgcaagaccgaggtcgatgtgattggggacaaatgatatgagcacgattgctgatttttgataggttcgattctgctagccttcatcgctattgtcttgagcttgggtatgatatggagatcggacaagaagcacgctgctgtcggccggaggtatggaatatctttgttcgctattgagatgtcgactgacatggcggtatttgcagggaaatgcaattatttttgctcggtttcatcattattgagatctgcgaaatattcacagtgggcggcttcccgctgcacgacgcagtccgaaaggtaggatttctacatgatagactcgaggcctcggctgacagaaacatctagggattttctgcagtacacatcgccgcgattacggcgaattgctgggtccttctcatgaacgcactggttggcttccaattacttgacgacggcaccccagcttccatcggtctcatctgcgcatctgctgtggtcctcttcatcgggacaggctatattgcattggacactgcattcgattggactggccgcttccagtcaagccatgatacaccaaatcgcaacatcgccctctatgttctgtaccaactcttcccactcgtctgcattgtcttgttctacgtcctagaggccgtactagtgcttcgggttctgggcgagttccgcccaatgcgtaggtttaccacactggactcaaaataaacatgtgctaacggtgcaacagtgtatctcagcggtgctggcttgttgttcgcaattggtcaaatctttaattatgttatcagcacccacctgtgccaggcctcgcatggcaagatcaatggagctttattcgaaactctcttcaccctcctttctgtctccggggtctgggccttctggagtagtatcaccgaagacgactggcctctgcccgtgggtggcggtgcttataactgatttgataagtattccatttgcattatctattgactttgctttttcagtctcttgcgtgcgaatattaacgcctctaattattattttttgccatacatactttctttacgcttgtttacgagtctggatcttgaactgggattgtcgacgttgtgataccccatttccttgagtcatgtttcacgattcatctgccatctcttacctttacggtggttatcatgccttgttttgtgactcgttccagcccatctgtgttttatgaatttacctgcggcagtttcgatctgccagtctgactactggtcgaccacttccctgtcggcgtttacccgttattttgttttatgagagatacctcctcgccatgtacttagttgtaacccatgtcaaataatcgactttagcttctcctttcccgagttcattaacgctaactaaaacagccgattctcacccctcatttatatgaggacttttgtgcaaatgcccctccagtctcttatattggtctctgatgctacctacccccagtacggacattggggaaagacaaactttctaatgcgactcggtgttaccactagggtatgctagtttgcacatcgctttatacgccatctcccaattggccaccagtgtgacatccatgccgagggctgagtgtccatcccttgtgctgcgactcttagtacttcagtgtatataataagcaactatctaatccaacaacagcgtaactcccttcatagcccaatagataccgaatttggacctacccctctcgtttctttgttcttaattctctccagaagttgtcgaatatgcgcttcaatatcgccactctcgtcctcgcctcggggttcgcctcagctacaggcacagctcatgtggtcaataatacctacatccagacctgtacatataccttttcataaatcaattattcgaatgcaagttcgataagctagtatactaatacaaggtatacgcatagtgcaacaacagaatctagatatcgtccggcagctcccacagatgtgtagtctcgctgcttgtctcaacttgacagcccagattatgtgtattgctaatgccattatcaatggtgatccggctgctctgcagaagtgcttaacgacttccatgagtcaggtatatttctgccttcatcgagtgaacaaagactaagattcgagtctaggtctgctcatgtgttgcttgtgttccagcggttgagaatgtgcttgttgcgctcggtatctgtccagtttcgagtgatgtagacgacgatgagccttcttctgggtaatggccatgcagtcctcggccacgtgctagttaaaggtgttgtcattgcatgtcatacatagtttatgcttctttcctagtgtaataatgctagttaattgtctttctcctcttctcatctctatcggcgttcatgattaacttagtatcagggacatataggcaagggctccaaggttagataaatcgcataatgtcagatgtagtcacggctttcaaggttgggttaagttacgacagtagaggaatctatatctctagcaaaagtcatccagtgattgtcagattagtatagaattagttatgtgcagtgggtatttagaggtgttcaagaaaggaggatatcgagtcctgcacctgaactgaaaacacgagactcgtaattaatgtacgtgaaattcaaagtgcatttgaatgtatcaacagggaaagcttaaccaaaacctttacacacctcatagtcgaactttgacatcgacacatgggagagtccactcccgtctccccaagaggctgcgcacccactccaagccgactcctgtccactcggtgggccttgactccattccattaggagaaattcgttgctggacaccctccaacacagcaccggctaaaactttggcggtggagttcatagtatcgaaaacaaattccgttagaccctcgccagacactgttgcttcgtatgtggcgttgcccgaaatggcatagttgctaggctccgaggtatagcgtggtgcaaaccaattacttcgtaggtcaaagatgcaccggtctgaccaatgacatgacgagacgaagagaatcaggagcaatgcggagcagtagatacatggccggtggatgatgtatgtcaaggcaacaaacgagatgataaagagcggggaggcgttggtaggaataaaaagaagaggtaaccagctataatatgaatcatatgggttagtctgaatcccctactttgctgctgattgctagttgattgcttctcttaccttcgtagacagaacatgatggggtttgcgggcgctggtcttctgacggacggaaaggtgcagattgatggacaaaagttttatttgacgtgagttggatatcctgataatccagtgagctcaccaccttcgaactcagtaagtgaaagtgggttaaaagaagtaacagtaatccgattcactaatgacgcgagtcgggcaagaaataactagccacagtcgccacaactcggcaggctccagccacacccacggcttgaacaatattaccgagagttcttctctccttcatcctccctctctacttcaccacgttcttcaatttcatctctctttctcgtacttatctctgatttgctcttttgccgccttttctagcctttgtgatttccaatttcatactctgtccctctcgaaagagagcttctgagagctctgcaaagcttggatcctatcggcggaggtcgcctgtaaccacggcgtaacggcagaaatgtccacccccaccgatctccaggctctcttagccagtatccggcctcgtccttctccttcaaacactcctggccaggataaccaccaggcccagcgccaatcgtattaccagcctgctctgttcccgccgcaccctcaacagcagcaaccttacgatggtcagagctaccctcatccccagtcgcatggttaccaacatccatcagtatcctcaacttcccaaagtcctgccccaatgaatgctccccctcatcagagctctgatatcttgagccctaacatgccttctcctcggggcgaatggccccagcagccgcaaccgcagcataccaactcaggctctgtggaccttttgaatcttctgagattcagccagcgtcccggtgcttctgctcagccgcaggtcccagctgcagctcccgatcacttgcagcccccgccggcccagggagctccttcgtcgcacggacgaaatatttccgcgtctgacttagttgctactttgttcggtcaacaggcccctgccgcccctgcggctgcgcctgctggtcctcccccggccttccaatctggtcagcctgagggccctaacgagaatacacaggatatgttacttcgcctgctcaaccgttctcggccaggtcctgctgtcgccgaatcaccggcgctggcttcaactcagcaggtaccatatatgcaggctgccgttgatgaacatcagaaccagacagccaagaatgtcttcatggaagttgtggatgagagtccaagggcgcctgcgaacccagaaacggtcgtatcgcccaactcgaaggactcaatgttcacctatgtcaacccgtttgaccaattagccgctatctctcctgttaataagtctcctcagtccgcttctggtatccagagcccagctgttgaagtgacgcagaagcaaaagatcaatgtttctactaagctggagccttcgcaaacacccgagcttgcggccccccgggaggggacccagtcgccaatcttgaatgaagatcagagagaggctgtgcatgaggtagttggtcgtttcgtagatgagatcagccgctctctcagcggcgatgagcctcgggctgcaacggaagtcaagactgctgtgcctactgcccaggagaaatcctctgaagcatttctttcatcaatcgctagtcaattgcgcgagactactgctgaagctaaagaagcggcaagcttgacccaggttgacgagctcgtgaaggagacagaatctcccacggttccagttgccctgaaggtgaccgagagcactgaggctctagctgacagctgggagagtgcggaagacagcgccgaaaaggaagaggaacgagttgtctctgtttacaacttcccaatgaggccattcatctccattgctgtgaaagctacgtctggcaaacttacgaccttccgtgacgacgatgtcatggatattgctcgtctaaagaaggagttcgatcaacttgacaggtcgctgacagcggctacgtccgaatatattgtgtacgcactcgccaaaactggtggcatcagaattattcgacaggacgatggtagtgaccgacaggtgttccgttccactcgtgatcgagtcttcaacgttgcgctgtgtacagctcctaccgcggctggtgactccgaagtccaggcaattctcggcattggagtcagcggctctgtatattgggctttgatctcgcgttctggaaaggatttctttgatatggatgccttggaaagcgaaagcttgatcttcccacctttcccggcctcggacgagaacacctctggtggccagctgaaaacgcgagccaagcggagtactcgtcacaccaacttgtttgccattggtcggggcaagaacatctacgttgtttccccaaaggcagcaatgagccctgcctacggcgtttctggtacccagcggacagttaacaccgagaaattcttcaaggagcgtgcattgaagatttccactggtaaagccggcaaagacttcgccttcagcgatgatgattccgtcatcgcctcattggacaagaccggccgactgcgcttctgggatataaatgatatgcttaatgacgcaagttttgtggaaggccctgctcctgccgagatccgggtgcccttgactaccttcgtcactggctccccaaccgaaaagtcctggcccacttcggtcctcttcctcgataagcttcgcgcttattcgcggtctatggcgctccgttatgttttggttgggctcaagcaaaaccacaccttgcagctctgggatattgggctgggcaaggccgtgcaggagttgaagttcccgcacgagaacgagtccgatgctatttgcagcgtggcttatcacccgtcatcgggtgtcattgtcgttggccatcccactcgtaactctatctactttgctcatctttcggcccctcggtacaatttgccccagatgtcacaggcagcctacatccgagacctgaatgataaggataacaccctacctaagcccgagtccactgcttgcttgagtggaattcgggagatctctctcggttccaagggtcagctgagaagtttggagcttctccctattaccaagtccgctactgacaagcgcggcaccgaggaaacccccctatttgagctctacgttatgcactcgcgcggtgtgacgtgcttgaatatcaagaaggaggatttgggctggactgcggataacaaggttattcgccctattgatgcgttggagcaaggcgtgattgaaatcagtgatcttcaaactttccccacatacgccaccgatgatccatctcttaacggtgacaccgcctctatccagtctcgcgttggtccgaaggagtcggcgaaaaagccagagattggagaattggcttctggagttgctccttcgcgtaacgcttcgcctatcaagttggctaagaagaaggaggagatcagtgaggcacctgccgtggtcgagaagtctgaaaagaagaagaagaagaaggcatcagctgccgccgaggctgccaaggcaaaggagccatctctcactgctggtgtcgaacctctgccggtccccgccgccgctgccaaggaactacagactcttgcctcgtctactacggcgatgggtgccacccaggcggccgaacatgcagtgcccggtttcggtctgtcaagtgaagctttcagcaaacacattcagacactgcagggcagtgtttcaagcgagtttaacaagagtcttggccatgagtttgagaacctccatcgtcgcttcgatgatgaacgtcgcagctgggatgctgcctcgtcggccaagcaagaccaagtgttgcgcctggtctctagcacgctctctgacaatgtcgagaagaacttagcacgtattgtctcagccagtatccagaccgatgttattcctgtcatcgccgatgccacctctgcagcagtcaataagcaactgaatggcgctgtctctcaacagcttgggggtgcgttcaatgaggagttgcgacaggttcttcccaaggctgtcatcaatgctatgcagcaggcacctgtggtaaaggctgtctcggattcggtcgcacagaaacttgcacctcgcattgaggcggaagttacccgggtcatgcagtcttcgattgcccccatgattgagagtttggcacgtatcaccaagaaggtggagtcggatatggaacgtcacttccaggagcagattaactactacgaggcccaacgccagagtgataccgcaaagatcgaggagatgtcggccctcctgcgtggcttgtccaatactgtttctttgctggccgcgaatcagggccaccaactccagcagacccaaagcccgcagcacgagatcccccaccgcgagatattgaacgccaacaagcactcgactagacagccaagcgagaatcaggtgcgcatgccgcagcccttgtctcagcctgtgcttcagcctcaggctatcccggtccaggccccggtcccggttcctgtcgcttcccctgtcgcgcgatcccccgaggaaatcgaaatgggggatattgtgcagcttatcaatacggctcactatgagcagggcactatcaaggttggtttcaatcacttccatatattcggtgtttttactaacgttaaatttcttagtggctccaatcgaaccagcaagctgatctttttgacaacttctttgtccacatatctcccgcctacttgtctcgactttctgccatcgtcatgctctctgtggccgttgctgtcaccactaccatgcagaccaacattggccagcgcctccactggctcgaggtggttctccaaaatgtgaaccccagggtatgtcattatcctatctcaaatatttgtaatattctactaactctggctttttaggacacggatctccgcgaagttgcacctcgtattctggacatcatgagccagcgcctcaataccctttacatgtcagtcgttgagcgcaacccgcatgacccaattctgcgacttatttcacccctcgctcgccgtgctcgcgaactgcacgccagcctttcttaaattgcgttttatttctcgccttttgcaagtatatgaactcggggccacgatgagttcatgatctcgatacggacccatcaacggcgttattatcttgctttttagtatgacgtgtaatgatatcgaaggaatgacaaatacaaaaccagaaaaaatacatgaattcgatcggagaatatagtctctctggtaatcttcggggatgggtggaacggttatcttggtcatcaggtcaaacacaccttgacgaggttatgaagtttcctttgattaggacacattatttgataccaatgcacaccacttgtatttgctatttttccgagggcatattctatgctggtctaggcatagcactgtgaatgctggtaaagctttgttcaacctctcttgcttgtatttgtctagttcttgtactctcatgttattgagactctatcgcttaagattgaagagcatccggaatgacgaatggtgcaatgctcgccaatttctcgtatgtctccatcagctcgcgctgtggcccgttcaactgaaagatgacaccagctccagcttgaaccaagcacgatttcgatccggctagaaatttacgaggaatgatataatgacccacgcaacacttcgctctgctaatcaagcaattggatgaatccaatcaaagcgaagcatagccgtacggatcgatcaaatcccagatgcaattaaggctaggtcttgttatccccgcctgtggtctggtgaataactaagtgggcaggtctctctgactcaggctgaccgacgccgggctgctgaaacggtgaacgaggacgaggatggatcaccgaactaccaatgccaaagaatgacgagctggggtttgcaccccggaaaccacgcttgcggctgcgataactcgcatcctcccccgttgtgagaggtgtggccgtgctgtgtgtgtggctgatggttgagatggggaccggttcgggcccctcgtatgtactggtgctgatgacgctggaaatggtcgatgggaggtgatagccggcttttccaatggggacagagaggccatgtacaacctgggtttggtcagaaggtgactaagataggagggatgtaggttaggttatttagggaggagactcacaatactgcagattactaaaaaccagaccacaacttggatagtctccatcacttgctttacgtcccctggcacctcgccatcgacttgtatcttgcgcaagaattcacggctgattgacaggtagaagatagcgcccactccgatgggaccgaagaagccgacgaatgcagcctgggagacaaggtcgatctgcgggatccatttgtacatggccaagacgattgggaggcggcggactaggaggatcaatattcccaggaagatgagccgattgattggaatcacgctgttgttcaggaaggatgaccatgggcagaccgctccaaaccacatgaagacagacaggttaagaagcatgtcgattgttggttggagggaatcgtctatggtctcaaggcggaaccagtcactgtctctgttagcattcatgatatcatagcctgcatcgaggtgacctactcttgcgtgaatacatttccagcaatgaaacaggccagaagatcatctgttccaatcaaaccacaggttcccacgatgaacagctatttgagaggttagcaaagcaccttttggggggggggaattcgagatgaactcactgcaagagcaatggcaaacaccaaaaagctttcccggtcaacatagcgcttctcctctgcccagtgcaacagcttcctcgcaatccaaccaaccacagttccatagactatgctcaacaggatagtatatgcccaggtctcatagaaccacaacgccatcgccttccccgcaccaccgctatagctctggcttcccataccagtatactggaggagataaatggcaaagaaaaggaacgggtagccaagaccatcattggcgccagattcagcgataatgattctctgcagctcgcggggaacatgtttatcggcaaatttgcccttaacaatggagttggatagaacggggtcggttggggtcacgcatgcgccgacgaccagggcatggaggaacttaaaattcggaaccatggcccagatcagtaggctactgcacatccacatggcagccatgcctggtccaaggagtagccctaggctccgccattcgatctgcagataccgctttgggagttggactccggctaggaccagctgcacgcctagcactaagcgggtaaaatgcaaagtgattacctcgaggttttcttcagaatggagtgcatagtcatctggtctgatgaaattggctgcatggggagagaataacactccggctagcagggagattactatttcatgttagcaaatgtggtgataccaggatgacttaacacttacatgcttcggataggtagaactgctccttgcaaaggtaggatactagtccgaatagggaaacaaaacctccgagcgttgcgcagacgatgttgaagttgatcaaggcgagtgtcggcattcttgtctgcactatatcccgcttggaatgttctgggttttatttgggggcgatcgggctcagatgtatcaaccaatggagtattctggattcagaagagtcagatcaatgagatctagagacttgggtaatgtctgtaggtcaaggtcaagccaatgttattgaatcatagtttgaatttcctgtgtgattgtaggcaagatcatttggatatatggaagtgactttgaagcaaagaatggtagcatttgtatgttgctatgggggtgaggaagatataaagatacgaagatgagatgtctgtggttgggacatcccgggtcttggcacatgacctatatagtacactatagtacacagagaactacagagtcaactagttacttgtgtactaattgatattcctattccattggatgcaacattctcgctttgttttttgacaaaatgcttagtagttttcatcaaacaattcatcgggcacctcttgggccacatgcagtgcctctgcctttgcagccacccctctttgggctccattgacggctaatttatcggcctcttcattgccggtgtctttattatgacctttaacccattcaaacaaggtcttcaccttaaggtcattgcgttcctcgattttgatcagaatcgactcaaccaaatccttgttctcaactggcttcttgtcccgggtcatccaattgttgcgacgccagttgataaaccatacggtaacacagtcaatcgaatatcggctgtcggtgattatggttacatctcggtgccgaggggcaatatcaatcgcccgaaggatcgcggtcaattcagcgcgctggttcgtttgacgactgccctttagtggctccgatacgtttctgctgggataagtgacggaagttagaagacgtggtggagggtagtgaaaatagcccaatgtgcgagtgtacgaaccttgcatcgccaggcccaaagtatacccctaccccggccgatgctaatggggtgccattccttaatgaactcccatcggtgtatatccggagcatcccagggatacccgttgattgcaattttgtcgcagtcatctggggtgctgtcttgtacaccacctggccagtagctgggtctaggatgacgttggggtcgaacccatcctcagctcctgtcggcagtgggccgtcacctggcgcaaactcgactccttctgcgttttttggcttttcgggcattaccatatgagggccagagggcccagttgccacaccgaacccgactgggacctgtgtctgtccttcccgtacaaattcctctgcctcttcacgggtggagaacttgcgatatcgaggtcgcggaaacccgcgaatctgctcctgtgccgttgtccagtctgtgtatactccagtaacccggcccctttggataccatagaatcgtgtgttttctgagctctgcgattcggttgggagcttgataccgttcagaaacgcgttggctgcttcttgcgagggaaacgattggactaaggagcttgtgtgtcagtctctagctaggtttgcgcgtctgtttggatacccagtgcgaagagcgcactcacagattgctcccttgaaacccgttatttgagctagacagtcattccatccatagtagataccgggtttgtgacccgccttaacggcataatatttggccggtgcatttctcttgcgtttggcgcctgcgaccggcgagggagagggtttggatcctggtgaagccttggggaccgggctcggcgagggtgttgtcttattcattgcggttgattgatcgtcgctagaggttgaggcgaggattgtgagggtggggaaagcagagaatggcctcttgtaggacccagttgttggaaattcactattcgatgttgtattcgtggctgggcggacaggaataaatcgaggaataaatcgcgggcagcttagaagggaacaccaaggtcccaacttcaaagctgaccaaacacggccgtgaattttgatttgtttgagatgtgtgtatttttgggttatgaatctgagaggtagagatgatcgcttagagggtcgaggaattgagaattaggaataaagaggggggaggaaggggagggggggagaatactcaatccagcctgttgccagcgcttgacgatcttgatctgacgccaattcctagttttgacgaggatattatttcttgtgtttggtttgattggatttgattggccttgttttcctatacgtttgtgctgattctagtgtttgtatatatatatcctagaccggtatatcttccatgtctcagatcaatctgttgatttcacactaaaaaataagacaaaagaatatatactaggtatatagagctaaagccctacgctcaatcgtctcaatatcgcctgcacctcctgtcgagtagactgcacgacatgctcaacagagaccaccgtattgatacctccaatactcgcacccctattgaagccattaacacaaaagtccaagagatacatacagtacagagtccggatactcacgcccagatagtccttcgttggtgttcgccagccgcctgagcctcattgtatcgtcggatgatttcctcgtcactgaccccctcctgggaatcctcgtaactaacaccaacaacagccctgccgtcgtactgcctcggaaagagatcagttgattggaatatgtcatgtcgaatagacttgatggttgagactccgccatccgtcttcgatacgatggtctgtttaatcgtagacggcgcagggcattccgaggttgcaacaaactagactcggttagcaaggttccatctccacgagaagaaacaagacctactcttgtgcccataacaataccatcggcacctaacacagtcaattacctgcaaaaaagtccggaacaacctacctaggccgagagcagcaatacatcccctcccatccacaatgccaccagctgccaggatagcagtgctcgtattccgagtccttgacagaagatctcgcacctcaggcaagagagatatcaaactggcaccctgggcccactgatgcccccctgcatcggtcccttggactactagagcatccactccctgctgaagtgcttcttccgcagctttgatagttcctacctggacaaatatcctgatatcccagtcagcagtctcctgggcctttcgaatggcttgtataattggaagatgatcggcgtcagtccgagggaacgacagccagactgctgctactcgatgcttctggagtatgggaatgacattgtcaacgagcccgttcggctggaaagtcaagaaaccgacaccaagcggcaatgattgaccatcgatcaaaccgaggatagagcgggcatttgccaactgagcatctacgcctagaagatgggtggattcagaccggaagtcaaagcctccaccgataaaccctatagatggttagtctaaggtctagcagttagttcggtttgctataccgaatcctccggcctttccgacggcagttgctaggccggcatctgtaaacccaaacattggtgcattagcaatgaatggagcagtcgtatgaggaaaccattgtagtagtatgtttgcagccattgtggtatggaggtatgaagagaagtcttgcgatgcggggcatatatatggctacctcgggatgtaataggtacgtatatatattactaatcgtagtccagttctaaataactagtttataacagaagagaatattgagcattatgtatgataacaaatatcatctgccaaaatattataggaaagtttctcgttcatagtactttaagaagcctcgtcctacatcaatcagtttcctggtctagcggttatgattttccgttaacaattgcttcaagcaagtgttccggaaaggttctgggttcgattcccagggaaactattttttggtctttttcttctcctcagaaagagtttttcggttgcgtgtggattgggagtggagatgggttgaagtggcgccgatagagtgggccagcgtgggtatactttttggagagaaaatcaccttcgcatacggttaaatgttgaatgcatgtaagataagaagaatccacgtagtcaaattataagaagataaacacatttacatttggttggcccctacagtctcgcacggaacgcgcgccttaagggttcgagagcagtaggaccatcgtagatctgctgctcgacaacgcgggtgttgacctaagagcagagttagtagaacaaacgacaaagtgatgagggggaacctacatgttggagccctaattgatcaatccgttccaccccaagcagccgcatacatgtcttgatctcatcgttcaggactaccacagagttagaaatagaaccagatcaaatacccagtcgacttactctccaatgttcgacgaacaccgtcggctccaccagccgctaagccccacagagccgggcgtccaaggccaactgctttcgcgcctagacagagagccttgacgacatctgtgccacgacgaatacctccatccacatagacctcgatcttgccgaagacctcggggcagtatttccgaatttccaagagagtatgaactgccggaggagcagtgtccatggcacgccctccgtgattagagagaatgatacctttaacctgaggtgcgtggagtgaggcaaggtatgcatcctcgtgagtctgcagacctttcaagacaataggcagatccgtctgagtggcaagccatgccaaagtgtccgtccatgtcaaggaaggatcggtgcctgcgaacagttgctggccgacacctccagacccttgggttggcttgggggtatcgtccgatgagcgctccgcggcctttaccccgctgggaacggcagcggtccgtccgaccatgccggctcgctcatcctcctcgcgtttccctggaactggggcgtcaagggtaagaactatgaacttgatcgccttgagcttctggatgcgtgcaagcatcgtctcactctttttgcggtcaatctggacataaatctgccagccaaagatttgatttggagcagcatctttgacgatctgctctggtgtcatggaagcgttattggaaattatttgcatggccccaaagctgcgacatgcttctgcgatcccggcctcaccagatgggtgacccagacgggccatcgccgcgggagacacgtaaactggcgtgttcagtttatgaccgaggacggctgtgtccagatcgcactttgtgcaatccacaaagactctaggtcgcaagagaatggaccggtaaacctcattgttgaagtttttgctgatttggtcgtcggatgcggagtaatagtatgcccaagcttttttgctcacttgcttggtagccacttcctcaatctcgtccaagttgaggagactctccataggtggtgggccctcaatttcttctgcaggttcagaggatgcctgctcctttggtaatgtactagcatcgatggttcccaagcaggcctcgggcttaagctcctcctctaatatacctggcgggtgaatgggatcgtactcctcggtggcatcctgcccggccaatttcaaaatgatctttgcaccgccggggtggctgcccaggaaatcggtgacctacataaagagtcagacgtggccggggaatgaataatacacaatgggaatcgaatgaaagcgtacatcgtagaccttgccgtacagaaccacccaacaactctcacgagtgttgtgctttgcgactatttcttcagtcagtcgaaacatcccgcgtgggggtcagggaccggtgcggagaagcaataccttctgtcgcatcgaatacttttgccattctcaatcacggtgcgaggttggattgaatggtagctcttagaggctgcgactgggtattctctggagagaggaatgggaagggaaaaaggtgagagaagtaaattggagatgcatctcgaaccccggagagtgtggggaaccttcggtcgctttttcctcgttggggaattttcaattgccggccaagaagggattggaatcgacacgacgttattggtggaatatatttggcctattatcaagaatcagaagagaaaagttcattgtatacggtatacatcatatacatacaacatagtacctgagtcactatacacttccaaggtcccacgtgagagccaagggttccagttcacccgcatctcttcccctcgaactcttccactgcggaacccaacttccttgaacttgtgacgtcggatatcattccacgaataattcacacttgaactctttcaacatttcgcgaccatgtttgaggtgtgtttaccgtgtttacctagaatctccctgtctacccaatattcttcatcccatcctgtcctacctcacccagtagtagtggtctgactgtctcagcgtcgtgcaggggatcgttatcgccttcgaatgcaccgagcccgttcagcagtgctgacctcagatgaaatggtcgaggtgcgtgcagcccaacgcacctttgagggggcctatgtccggactgctctttcgcagttctccttcgccctggtcgtcctcaagatcttcaccgccgagttctacagtattggggctctattcgcgatatacggcacgggagttctcatcattggacttttccgccgttcgcagggaaacagacaattcttctctgaagtaggagaggatgggatccatcggcacaaattccgtaccagtggaaatgcggtcttggtcttgacagcactgagtattgcggcatacgcatgcttgattggcctgaccttgaacctgagcaactgataaggaacattctgccttgatggttgcacgcgattcatccatacaccgtatccaatatccctggaggctatcttctaggcatgttatccgtgacaccccctgcgttaccgccaagcgccaaggattccgcacctgaccacggaatatgggttaccattttcggcgcttacggtagcggagatcagcgtgcagcaatggacgcctacagttggtcggagatcaatctgttgtgacgaggaccgaaagtcgccaaggaagccgagtatggatcagcccgagcggtgagactcaggtcatacaaggcgttccaataattattgttcgattcactggaggctgagttcgattcccaacacggagggttatctagcatcaactcgcggcgtgccctggtatcccttacaagacgggaaacccaacaggtatgagcattttggtggattatgaggatattgtagggttggcaaagtgcacaggggcgagattgagcatggttcgatgctccaccggcgtgtttttctcggacctgtacccgtatgctttctagccaagcattctctattagatataggaccaatacatcttgcatgattttgtgagacctccaatcgatgtgaagtctataagagctgttcaatcctggatccgacctggataccttgcatctccacatctttcccctcatgctgtatacactttgacatcatatgggcgatcttcaagccatcgatccaccatccagtggactaagtcaattcggcagcgtaatttcatcattcctaatctctgacgtccttggcaatatccttgagtgatattgtacttccacatattggacaccaacctcaaaataattacctttgcgccaaaaagaacatatataaaaaaaaggaagccaaccactttgattcttgcaaccccttgaatatctcaggtggtcaacatcagacccagtgtttcccgttggttgactcatccaaacctcacaacactttcccttccctcccctctcccatcatctttttttcagttgcccagctgtgacacaagtccttatccaactcaagatcctgtgagaaagctctgaaaaagagcaacattaccccttcttaataaaacacaaacacagaactatcccccagtgggatggcgcaacactctagcattgcccggtcggccatgacgtcggccacttcgcctgagatgggggaccagaggattgatattaaatccaacggcacctccaatagctcgggatcgggaaaagaaggagctcttatgcccccgaaaactgtggtcaaccgagcgctaggtaacgacctgcattccgattcccacaaatcttcactgccgcccaagggcggagtcggaacggctttgacagacactccggtttctaccgctcctccgtctccacagatgtgagtattgtttctttttttatctagaacctttgaacttcactatgttcgagcctatcacaacgaggcttgaccggctcatctcgggatgagttcagttccggggctctttgctgccttattctgagctaatctaccttaccccggactccaccctgttgttttgcattttgctgccttacgacttacttggatgcgcttggcgaccctgtgactaatatgatccttgcagatcgggcctttatcagcctccgggtactcccggtcgagtgcgagcaactaccctcgatatccccggattgaccaagtccaaagtgtctccagatggccgtattgcccagcgcgatgtcggtgcgaagcttgtcattgtcatggtcggcctcccggcccgaggcaaaagttacattacaaagaagctggctcgctacctgaactggctccaacatgacactgaaatcttcaacgttggacagcgtcgccgtgtggccgcgggaaagtccccctcacctgtcccgcttgatcgtggccatggccggaaatcaagttctttccacaaggatctcgttgactcggtgcgccggttgagtgtcagcgttagcaccactttgaactcatcagacatctctccgccagagaacaatacaccgcttccgccaccagtggtgccaaccaagattcttgtgaatggagaagaaccggaacaagtctctctcaaccaaagtactgttgtaccctcgatcgacgcaggttctgcacaatctcgtgagaacgaagaagctatcaatgaagcgtctcctgaaccaatggaccagaccgccagcttctttgacccccagaatcagcgtgccgtcaagatgagagagcaggtcgcgctggatactctcgatgagttgcttgagtatattctagaggaaggtggcagcattggtatcctcgatgcaaccaacagcaccatggaacgccgcaaggcgattgttgaccatattcgcgatcgtgctggtcctgagctaaatatcctgttccttgagagcagctgcgtggatcaggatttgcttgaggctaacatgcgcctgaaactttctggtcccgactacaaaggccaagacccaaccgaggcacttgcagatttcaagaagcgtgttgctctctatgaaaagtcatacgtgcctctcggcgaatacgaggagaagcatcgcatggcttacatccagatgatcgacgtcggtcgtaaaatcgtcgctcaccagacccatggcttccttgcctctcaagtcgtctactacttgctcaatttcaatctctctccccgtcaaatttggatcacacgacatggcgaaagtctggatgatgccgcaggccgcatcggtggtgactctgatctcagcgaaaacggaagaaggtacgccaaggcgttggctcgcttcgtggatcaccaacggaagcagtgggaagcatatcagcgacagaaacaccttctcaagcacttcccgcctcgagctggtgacatcacccctcccaatccatcctatcttccccaggaggggccacgcaacttctgcgtctggtcctcaatgatgcaacgctccgttcaaactgccgagtacttcaacgaagatgagtacgacgttaagcagatgaggatgctggacgaaatccattccggcaagatggaaggcatgacatacaaggaaatccaagagcagtaccccgaggagtactcccaccgcaagagagataagctcttctaccgataccccggaccggggggagaaagctacctcgacataatcaatcgatcgcgcacagttattgttgagatagagcgcactacagaccatgtgctcctggttgggcacaggtccgttgctcgcgtactcctggcctatttccgtggtctgaagcgtgatgaggttgccgacctcgatgtcccgatgggcgttctgtacatgcttgaacctaagccatatggggtcgagttcaaggcataccgctacaatcctgaatccgattggttcgattaccttcccaattacgaactgcatcaggtcaaagcacacgcctagaatttgaacatggaggttcgaaatttcatgacttgctacgacctatcatgacttcttttatgggatgaattggccggtgtttaaggcactggtcattttctattctccttcacttttccgctctttactggactgtatccttgatttttattttcctacttgcgccttgattatgtattatctatgctttctcccctccactgttttccggagcgttcttttattcttttacagatgacctaggcactcgttacatgacgggcgttttatctgtactttcagacctgcgatgctcgctagctttatgagctggaggtgacaggtcaccaagagcgtctctccctcgacgtttcattttcggtatctttgcaaatgcaccaagatagaatcagccatggttttgcttgatagtctcaatagctttacttgctacggcatgtcaatagaactatgcagacgatcataataacaatgaaatcatttaacataacggcatccatagaacattctgatcgatgactatatgaaattccccctaacaacattctttattccttctgctcggcctttgcctttaccttctcgaagatctccatgaaggcctctggttcatcagccccttcgacatgatatctcccttgcactgagatatacggcacacccgaaaccaacctgttggccgccgtcttggcctccaaatcaacctcctgagcaccaacatcctcatctaacatcttcttgacactctcccgatccaatcccgctccaacacccgcctccacaaggaccttcaaatcagtaatattcttctcctcctcgaaataagcccgaaacagctgctccgcaaccctcgtctgcaacccaccaacagcactaccaacagcaccaccttctccaccctccttcctagccgcctcttcagcctcccgctgcccagcaaaccaaagcaagcgatgcgagtcccgcgtgagaccagtattcccgccaaaactaaactggattccctcatccttgcccacagcagataggcgcgcgaagatcgcactcacgcgctcagccccgaatttccgggtgtacatctcggctttgtttacgccgggatactcggctgatgctgggttgaggtagaatgctttccagtgtaggctgaaagtgtctgctgggtatgtagcttggtgagtggttatcgctcgtgagaggcggcggtagccgacgtagcaccactttattttttatggttagtatgtaggtctgacggggtttcgaggaatgcgtatagatctgtgtcatatggttggaatacttacgggacagacggtgtctgagattatctggatctggaagttcgtcattttgtcaaggtgtgagggagacaggacaggtgaagtggaatttgggatatctttgctttcttgtattttttttgagcttttctttggattttggggatgacattcgatttgtaagcgttccgtccggtttcaggtggtttctctcgaatcttctaaaagtgtacattctcatgtgctgggagaaatgaaataattgatatatatcacaagtgtctccgaagttattttgaagtacacgctatcatccaacaattacacgaaggctctacaggtacttccagttggggacctgataatccagaaggctagccggctatatattcaaacaaacaagccctagaaagactatcacagaatctgctgggcctggttcaagttattccacgaacctcctgagctgctgtcgaaaacagctgatgagttggaatgaacaggtacactaggaagcgggtgatgacgggcatgatccagtgccgaggaatactgtgaacgattagtgagaaagctgggctgaaagttgaacgaaaacgattgggaagtctaaccttgaagacaaagttgaggattaaggcaactgccaaaccgatgcagactacgataggaccgaacatgttgtctaggtcctttccactccgctggcggatgagacgggcccgtctctcgtatatgaaccacccccaaactgcagcgaagatggcaaagaatgtgtagacgacagctaatgcctgggctacctggttgtgcttgccagcagcattgtagaggcccaatgataaactcgacaggaggatactgatgtgaagccatttgataaatgttcgctggttggcaaggtagaccttactttccacacgaacgggcccagcgtctttgatccagacgccggggtgtcgaacaccaggcggcaaagagacagatttcgccccaagccagcgccgaggagaaagtccgaaaaaccgaaagatggactcgaggcgagtgggccgctcgggttcttcctctggttcgggagcgggttcagtatcacggcgctggggctctgggattgatggacgtgggtgccgcgctgcaggctcggtgactgctgaggatctccgcatggccgagggagagcctgcactggagtattggtggtaaggtgacccgacttgtgggcgaacacctgggctgcgcgcgtctcccatgaagctgcctactgctatgttctcctccgctcgtcgagctaatcgctcttgctcctcatggaatgctgtttcaggatcacggcgaatatcactttcaagttcaccaagccagaagggaaagctgttgacatagtcttcaaacagtgaggctacgccgtggacgaacttggagaagcggggagcatccttgacaaggtgggagaccatcaggtccttgacccactcggtgttatgggccttgcctcgaagctggatctcgagcaaagcgtgcgggaagcgggtgatctctccagtcctgatagcgctgaagggataagtcatatcggcatcgtccaagtcggtacggtgccactcggcaggatcacgacatggacgttcactgtcgagggcatcttcccgaatgagcgctagattggtatcgagggaaatacgaattcgatcattgccaggaatttggaaggcggtgcgcgtgtagttcgcccggagcatgggttgcaggtcattgtccttgataaaggactgcagctcatccacgtcccttttcaaggcttcggcggcggccgactctccattggtcgaatcctccatgcgatggacctttttatcgaagcggtactcgccgtccaaaaactccttaacgtgcttttctttgagttgcaccttgacttttcgactttcgtcgtcgtcggtgacaatcttcttttccaactggatggtaggtttgtctttcaacgatcccgtccagcgcagtcgcaaagatccggcttcgggtgctcgtgcgaccttttgattgtagaggtcaaactgaggggaatcaaaatagagagaagtaatggtggggtcttcagtgatggtatcgaggtccttggaagttcccggcctgtagataagaaccggcaatcgacgaaggatgtgagtcttgacctccaaaacgttgtctgagtgaacccagaatttgtaagacgaataggtctcacggccaaatccatgctctgtctcccttggttgcacgatgtcctggttcagagtctcccgaacaaaggagtacatcaccgagaggcgatggaccagcggcgaatagtcttccgagttgaacggcagttgtgacagtcgcacttgaagcaaaggtttcacccgatatcgggctcctcgtttgcggtcatgcttctttgcagccttcaggaagccagtgaaattgattcggctgtacttttccaaggcactgacttccttggtgatgctatcgagttcttgcagaacttctgaggcaatagcccttttcttctgttcatcgagaatgggagtttcttgctccggagtagatgccaaaggtcggagtttagcttcacatgctgttgtccgttctcggagttgctgcgatgtctctgcttggaaagaattgaccttgtccagctgtacattgagcagttcttgcacaaaggcttcctcatcttgctcagtccattgatcgtcatcggagtcactgtcgtcttctgcgtcccgggtcacatcgttctctctcagcaaggtcttcagtttggtgtagtcaatatacttccctttccagggggggtacaccgcagcacggagggtttttccaaaccgcattttgagccagtccggttgtgcagtcgttactcagagatggccgggtggtctgattaggaggtttcgaaggaaggaagagataagagagagaggattgagacagatcttcagttagggaaaacaaggtaagagctgaggttcaactgcagatcgaaaaatatgtgcagacgccaaaagaaatagctcgttagcttttaaaacttgcagctttagaccgaaagcgttcgatagccaccgatagccgcacgtgctcattggatgtggccaatcggattctgaaaatggaccggaggatgaccagctattcggataatctctgttccgacggtattgtatgttactttacggtacaggagtacgggaagtacgggctagaccgatatcgccccccgtcgggaccagagagagggacgtgcacatggactctccgataccgatatccctccacaatccaagggatcctttgacctcttaagtatagacttgatggagcccaagtctacacaaacctcgggtctgtcccatcatcttcatggcgtattagccgagctacatcgtcaaccttatccttacgtcccaaatcctccaacctgcaacaagcgcgcctcggttgccttgattattcgggtacgaccaacctacgaccattggcccaactcaaaccccacaaaagatgcttctcagccagttccacaacgtttagatgagttcttctcacagcaatgggtccagcatggtgaaccggaggttctgttcatcaagcgtgcttcgcgcgtgggtgaccgatggactggtcatgttgccctaccgggcggaaagcgagacccggaagatgcagacgataaagctgtagccatcagggaagcttcagaggaaatcggattggatttgacaacggaggataccattagtgtgggcaacctccctgagcggctggtcactaccagctgggggtccgaaccgtgcgaatgccattcaccttcgcctctgagaattggattactgacttgaattcgcagcttgatggttctttgtccctttgtatttctcacaactcgcagcgactccccgacacttcgattacagcccacggaagtagcatcgacacattggatccccctgcgcgccctcctgtcaccatcgctgcggaccgtggaatatgtggatatgtcacagcgcttcgctcgacaaggcgggtttctggcccgtattgcaattcggtcacttatgggctggatgcagttctcggccgtgaggctcctcccgtcggaaacccatcaatgcactacaactccagggtttgttcccgaagagaatactctccaacctggcctgctccagcgtttcaaaggatggtgtctgagtgggcaagcggagtccagtgatgctgcccgtccgctgctcctctggggtctcaccctcggcatcctggccgacttcttggatatgctccctccccaccaagctgtgcagttgtggaagtatccaacatttaccgtgcctgatctgcggctgattgtaagcattgtgacttataatctgcggaagcgtaatgcgctcaatgtgagatcgggtgctcgtcctagtaacacggctgccgatagcgaaacggccgcactctcagtcacacaggagccggatctcggacatgatcacaatgaagtgggcatcggtggtctcggagtaggcagatattatggtccgaccgaccaagcaaaagatggggcttcttatgctgttggaatcatgctgcgcgggtattatgaccgcttgcgcatggcaatctgggttttcctggcctggcgtgtagccattggttcaattgttggtatttcagcctggcgaattcttcgacgactgcgttgaagtgtacattagcaatatacagttgcaataaagatgtaaataataaagatttcccgtacatcgaggtacatcacatgtttgggacatgcaaataccaaattacataaggaacagatcattacggcattcggtcagattagctcccccacatcctctctggggggtaaacattgaacattgaacattgcacacgactatcttcgatttcaccatctcctatactctactcattatggcggcagctcaaaaactttatccacgaggaacagtcaagcgcattgtcaaagcccactccaatcggagcgtgagcaagaatgccgacatcttggtacgttgtcgtcctgatatcccctctcttatccagttgctaatactacctttctagatcttcttagactatatgctattcatgcaagagtatgtctccatctatccttgtggcggttgcaacccaattggcactctcactgccgccattattggactggcgataagttaacacattgtaggctaatgcgcgaggcatcgattcagtcgcggaagtctgacgagaaaaacatctcagcgaatactgtgcgcaaagtcactgaggtgcgtttggtcgatctaagagcttctccggaagactcgtgagaacacacagctgacaagtatgggcttttttagaaaacactgcgcaaattccagggatagaaaagcccagaacataacctcggtctgcccattatggcgaatacctgcctagcatggttgtgaaagacgaggggatcctgtactaagactggcttgcattttgtgatattatggcgttgtgggcgaatgtgaatatgataccctggagcaatacaatagaagaaatgaataaatcacaaccaacagatcagttatctcataaattacgcgtttaaagatatagatagtactgtgattgcttaattgcttcgcgctacgcacgcgtcgaaagagagagagagagagtctacttaaagccagtgggccacaccgaccaaaggctttccgacccgcatgttgattcttccttcataacacacgtctttccttcaacgttatcgcgtttaatccttcattccagacctgtacaagcttttcagaaatactttaatatctgtgttacccacattcccatcatgcctcccacttccgctacccaaaagctcaaggacgaggagaagggctcgcgagcttcaagcgtctccaaggatcccgagagccccaactctgaaggtcaagagagtacctacttgaaggagctgcagaagtatgttcagaatcttatgaacccagtggcgtggttattgcctatgcgcaagtggaagtgacctaactgctttgtttaggacacttcgcaatgccatgaagaagttggtgagttattttcgaatgatactttggtttcgattgtttccattgacaaattttaacgttgctatttttctgactagaactcccttgccaaagtcgacgccatcatcgccgagaaccccaacaagtcgcttgatgaactgatcgaggagaagaagatcaacaacgaccagaaggcacaggtcctgaagaagccttcccttcaagctaccgttgctcaggctgaagagcagattggccactacaaacaatttgctgtccaatacgaggaccgtctggctgcccagaaggctgcgcttgtcaaggcgcatgaggcggagctcgaagctgtccgtaataacgccattgctgatgcaactgaagcctccaagaaggcactgcgcgagcatctctataccgtgactaagttcttgtgcgccgcggccatccttcgacgcgacggcgacaccatcaccaccgagagccgtgctttcgagggtgttctgtttgaggtgtacgctggcaaccagtctgcagtcaattcgcttctgaagattgctgagggtgccgatgagaaggtcaatgctgttgagggcaccattcttgattttacctgtcagtaatgaatttcccagccccaccctcaccgaatatctttgaatgtgcttgctaacattatatctatttagatggcgacgtgaagcaagcatccgacaagttcgctccgcctgaagaggttcctgaaattgcctcggaggcaacccccgccaccaaccctacgaccgaccctaccgtggctaacgcaggactgaccgagctccaggatgcctcattcggcgccgaggcccagcctgcagcttcccaagcggaccagttggctcctcctgtgcagactctggtttctgatgctgcaaactctattgcggagcaaacctgggctcctccttccgatgaaagcagcgaatgggtcaaacttcctcgcaatccagatgagaccgacactggccttcaggctactccagctagtgctgatgcgggtctgaacaacggttccgttggcgctgatgtttcgactcaaggcgagaacgctgccaagtctggtggacgccgccgtcacggacagggacaccgtggtggccgaggtcgaaatgatgctaagcgtactggtgagggccgcggtggcgaaggccgtgctggtgaaggtcgtgctggtgagggtcgtgctggtgaaggtcgtaccggcgaaggtcgtggacgtggtggccgacgaggtggtcgcggcggacgtggtcgaaacggtacaagcggtgctgcctccggctcggcggaagctcccgcctccagcgagtaagagtggcaatcttaggatgtcagttggaacatgctgttttgggatcttgtctcgaagtcgatgttccgacgagagattctaggtctgtctttccgggactggcctcagcgatttctggtccgatgtgatggctcacgaacgcaacgaattttcttcacggagagtcactttgatctcttcgtctggctttgccaaagtcttcttgaccatgtcctgcaatttttttcagcgtgcatattcccgatcatcagagagcttctctcacgacatacatatgtattctatgctattgttttatcggcgcttgtgaacggaccggtggacagggcttaggtcgggcatagatcgaaattgatcataatgagtgcactattactttccaggacttgctgtagatacccgtattttacgatttgggtcgctttagttgaacgaaataaggtctactaggtctactacttgaatacgtggatggtagtcaatggcgtatgataactagttactatagatgtactccgcagtattgtaccatagtcagtcacgtgatgtaactagcttggcgtaatgtaatgatattacacaagaccgaatcaagtgcggggcaattatgcataaaataatgtaaataacggaatacacttgaaatgcgcttgtaaaggcgtgttccgttattactagcgtgttttaagatgaaacccgtttttagcgcagggcgctaaaccacaataggaaatgcataccgacgcccagtggagctcctggcgtattcaatctgattaaaatggtctttgtgctcttgcacaagtgtcaacttctccagattcttgtccttctgctcatttttggttctttccgccctcctccttatatcttctactgtatatatggcaccagcaacaatggccgtcgctggcgcccaacgtaagggggtgctgaaggtgttgatgctctcgctgttgttagatttggtaagatcaaggtacccattcaaagtcaacaatcacatttattcaattaacaatactttcagatctcctttacattcattctgcccctcttcccttcgctgctatcgttttatcacgcgcaagatccatcccccgattccctcctcaaccgcatcttccactacctaaacgcctacaaaaattcctttgcgcgccccattgactcgcgttatgacattgtactcctcggtggagccctgggctctttgttctccctccttcaagcctttgctgcacccgtcataggccgcctatctgaccgtcatggccgccgtcgcaccctgctcgtctccatgctcggcaacctcttgagcgtcgcgctgtgggtgtcagctacggacttccgtacattcctcgccagtcgtatcgttggggggatgagcgaggcaaatgtgcaaatggtcaacgccatagtggcggatatcacagacgaggagcaccgcggctctgctatggcattagtcggggcctgtttcagtgtcgcgttcactttcgggccggcgctaggtgtagcgcttagcagtatcaatatggttgccgaaaacccgttcatcgtcgctgcaattgtgtcttttgctctaatatttattgagactgtgtatctttgggtctgtttgcccgagacacatccccgactgacgacgcttaagatggagggcaaaagtacctccacccagaataaggatgcattgggtaagaaaaccgaagataggagcagtgctcccgctaagcgcacccatacaaacaatccggcccttctcaatgccctccacttcctcttcctactcccattttccggtctggagttctcccttcccttcttgactacaacgctctacgcgggatcagccacaacagtcagccctgctgcgttgaacggacgtctcttgtccctgatgggcttcatcgcctctctcctgcagggtaccctggtgcgccgtctcccgccgctggtcaccctccgtgccggtgtcgtggcctgtaccatctcattcttttgccttgctcgcgtttcttcacctccaggtctctatgccgccggtgctttgttggcggtaacgactgctacggttgttacgtcactcaacagcctgggtagcttcgaggcacaggatgcggatcgcggcgcggtcatgggtggtttgcgggggtggggacaggctggcagggcgactggtcctattgtgttctgctctctgttttggtgggctggccgtgaggctgcttatactgctggcgggttcgccatgtgtgtcgtcacagttgcagctttcagcttgctgaagtcacctgctgtgcataaaaagactgaataatgtatatagaagcatactaataaaaaaatggtcacaatgtcttgctattcctttttaatacatcaacttatcagtatcagctccaaaatatctctgcctcttctagcttgctattcttcactcagtctggacatgtttctcggtgttatagttaggaggataacgggtagcagactacgatgtggcacaattcttacaaaacgacaattccgtgatttttcattgctgtctggttttttcaagtccgtaacagggtataatacatagaagagtggcgatagtatgtctcaaggattctaacagacaaggtcaagtgaaagagaggacttcaatatcaaaacagcccatctctcgacacccataatcaggcgccgtaaagccttgagtaagaaaacatattcgagctatataaaaaagacacaatacagcaagaatgtaaatatgaacacagaagccatcgtacgttctttcttgtcttcgagatatttcatttgatgacagattcgctcgagttatgatcgaatatgagggtgaagtcacgacctccggccactgttggaagcaagcccatgactctcaccggtcgccatggcaagtccagtattggcagccgggtccaacgagccacgcgccttgccaataagccagtcagtgagagtcacgaatttagcagtccggtcccagccgtccgcttcatcggcgtgctcgatagtatgagtcaggatgcgaccctcctcatcgaaagaaaagataaagatgccggtgaattgctcttcctttgacaacttgaagataggctcttcaccaccgagaaggacactcaagccattgttagtgccttttgtggagttcgagagatgactattttgtgagaatggggcatttttcgagggatttgtagaattgatattccaagaggctgggccatggaaggggcggctttctgttcgtggctcggttttccaccgtactagtaggcgctcatcgccgcagtcgtgatgggcgccgtgacgcgtggggtcgagtagcgtcccggctcgtacgatcctttcgctgagaatctgcaatttcacatttccgactagtggcacgctgctccatgctaccgggacagtccataatgccgcgcgatatagtgtgcgtcctttgacggtggggaggtgtggatgtgtggatgggaataggtgaaggttaacactcggggcgaggatttcggtaggtaaggtgttgtacaagatggtcggtaaaaggggtgagaggattcgtaaagctttgatcgttagttgaacggctttttggaaagtgaatgagacagtgagtacatactctttccgagtttcaaggttctctcatctggcggttggtgatcgtttctcccaaggccttccacatgctccctccgcacccaagccggggagaaatatgtgactggtaaaggtgcaactgaagttgaggtcaaccagggctcactgagaaggccatgacgaagttgcgccagtcgctgtcgcgaaaccgaagcaaaaagccggccagagacagggctcttcggctgattgagaagagacgtgcgcagggagactagcttcggcattctgcattttaaaagtatgttgtcaagccatgtagataagtggaaggttgaagttggtcggagtcgcggagtcggagagtcggggaaaatgacgttgtgggagccaatcacgatgctctggtatacaatttgattcaacttatatttactgactaggacgattcgtgacaggtctacagcttcccggggactaattaaaagtattattcgtaatcccaacctcaagccaattcatcatcgtcccccattcccatgacacgtcgttcagccagatcgcggatcttgtcctcaagaatgccacgtccataacgctgggcaattttagcagccgcctcgagcatcttaccgttgcggtccgtcatcaaggccaccagctccagcgccttcataccacgctcctcgccctctctgcattcaatggccagcatctgcagcaagttcttatccaattcgagctccctccgcgccaagtcagagcgttggcttgccgtcgcattggtcgatgagagaagatcgcggaagagcgacaaaagcacatttccacgtacgaatgactcctcgaaacgagcgccctcagccgccgtgtctccggattcgctggaatctttcggaagagtactggcaaccgggatctggaagtcgaattcactgagcagcggccgtggaaagtaagggttcttatcaccacccttgaggataatacagtggaacttgtcttgtgcgacagccaccggccagtatgtttcttctttccgccctcccgagagacgtgccatttgcttcgtgtccaggagcggtacccatcgggcttggccgggtgtgcgccagtgttgcagaactagtaggacgccagtcgactcgtatatacaaggatcctaagaagatggttaattccatagccaactcttctgtttagatggagcttaccccattatcagagaaaaaaacactctgtagcgaagccccttctggaagagcgacagtgtcttcgttttggcaaatctcgtcacgcttgacattctccaccgtgtatcgtaaggttgcgtggccatcaattcctatagggccgttgccgatgctcataatgtagtcgcgccaggccgcgcaagtcacggcttggctcttctgtcgatacaccttgaaaggtgtcccaaagagagtgtacactcgaacatagtgctttgatgtcacagtgacaatgtatgaatcgctgagcgccagagctgatagcgagaattagtaaggtgaattgtgtagtcctttgagttcttacctcggatttgttctccctcgggcaattcggttcgccagtccgctcgcgcagtccacgtctcatgtggcctgtagaaaatagtggccggactgccatctgaagggttattggcaaaaagtgttccgttgtcgtctatatccgatcagccaaaacccaacacaaaaggataagcggaaaactcactcagacaagccttgtcgtacatatacggatcagtgaagtggaaatctcgatgagcttcccggtcatagaattccacagtaacagtgtgatgtgtctcctggtccaccgtccagacagctcctgtcaagttcaggcctggccaagttagcaaatgcactacaatgagttggaacaagaacatacaaagatatctcctgctcccagcccaaggcgtgctaccgggttgaagaggcagatgggccttgggcttttcgaagccagagtaaaggcgtttgttactagtgtcgccgagatcatcgagatcatcgtggggccgcttgccataaatatttaactcttcatcggcatagccagccccatcatcatcctcgatgaaatcgatcatctggtcatctccaccaaggatatcatccaatgagtctggcgaccctcttctcgcggctcgctggatggcctctttggaccgctccgccagtgtggttcgcccaacattgttggagatctcgcccagaggcccaagtaagataggagctgcctgcagcggtttatgcagcagagactcgtgatccctcggtacaatgttatcatagatgaagagctctccgtctgaagttgtaaatgaaagtgagtttttggtcgggtgccaggagaggttcaagacatttgcaaactcgtatcgctgcaagatcttttgcgtctttgcttcccagagtacaatatatccatctgcagctgcagacgccagaagagatccgttcggggcccagctcaaggccgtaacgtcgccggtatgaccgccagcaaatgttttctccttcttccattccgaggttgagtagatcgagatatctctggtcgcttccgcagaagcaaatgcagtaccatcaggatgccacactgctcttgatgtcgcctcggcatctggccccagtcgtcgaatcactccatcgagtttgcggaccagctccggctcctcttcgtgcatagagtatatatagaggattccatctgttccggatactgttgcatatcggccactgggatcgaatgtgacatgcttcgttcccttagactgttcccggagatacttgacttgcgtcatgtcgtcgactttcacgattttgactgtgagctcactagtccaccagtgtcagcatccaatccactgtctggcacaatctctacagcacttactcgcttgctactgcgacccattctccatctctcgtcactgcaatgtccctgactggcaaagcacatcggacaagcaagttttgcattttgcccgacatcatgtcgtacttccagactgttccgtcctcggcacccataataaaagaccgattctagcaatcctgtcagacctttccttcgatgcatcgtaagtcttattccaacataccgtagcaccaatgccgaaatgcgcgtcaacaccttcgtcgatcgtcttgggctctccatcttcgccgaccgtgtaaatacgaatagccgagttggagccaccagtaatgattcgtcttccgtcgggtgtgtaggccagtatcgttgtgccaggtgtgtctatgtggaggccgccttgtcagtaactattgtagtctctaggtcatcagcatgactcacgggctgggcgcccccgcgggcgaagagggtcgaaactcattgcaaacgaggcttggcgtagatatttcaatcaagatgcaactagaaagcctggagcatcgttcgatcttgatctggtggatcacgaatagccagggatctacaaggtcagacgcgtccgcgttacgcgccttgattgatttaacccgattggggaatattatagggctcagggcttagggtaagggccgctttctccagatattccatcttattgttcgatattgagtttgtagctgaaatagactctaagtgctactagcacctccagctgtcaggaaatcgaaatctgctcccccttgtgcttgattcactgatcgctcatacaacccgcggtagcctctcctctgctttcttacctgcgtctctcccacaagactctgtctgcgtgtctcgattcgagtctggattactgcctcggaaacttccaagtgcaacttcctagtttcgatgtcgcaaataatcaggtcaccggtctctaccacgccaaatggtgactctggtagcgcagcttcaggcgagatatggaggataatggttccgcccgcggtccctgacatccgaccgtccgaaagtcgtagcatatccttcactcctgcctctgctagcttctttgggatcggtataaggccagcctctggcatacctgggttgccaatcgggccaatgttttttaggaccagcacactgtccttcgtcacaacaaggtttggatcatcgatccgctgagcaaggtcggccgaattctcaaataccacagccggtccagtgtgtgatagtaagtggcgatactttgacgctgatgctttgatgacagcaccgtctggggcaagattgcctcgcagaacagccaaggatgacgcgggaaacaaagggtctgacattggccgaattatctgttgcgcaaaggaaagtcccttggactgggatgcatcgaggacctcgcccagcgtttgcccagtaattgtcacagcagataaatggagcaggggtcgaagcacttgtaacagcgccatcatgcctcctgcattgtggaaatcattcatataattatctccactcggtttgagatcaatcaacagtggggttttgcggccaatttcctcaatagtgtctagagtgatgactccctgcagttctggatgtctatttgcaatagcgagcagatgaacaatggcatttgtcgaacccccgatagcctggagcactgtgatggcattccagaatgattcctttgtcaatatttcttgtggctttctcttggccttggcaatcacaactgcatttgcgccggtctcttcggcaattcgcagtctcgcagatgatactgctggtgcagttgcgccccgaagcggcatcattcctaatgccgcagtcacacaagccattgtactagcagttcccatgacaccgcatgtccctatctgagcgagcgatgattgtaattagtgaactgaccttggaaatgaccgtgtatctgataagagcgcatctgcacataccgtcggagcaagctcttcgttaatggccgagatttcctcgacgtccatttcacccgctcgaaaagctgcccaattgtttcggcaatcagtgcaggctccaatacgctggccgcggtggctccctggcagcattggaccggtgataagtggtaggattggcttgttggctgagataccacccattaactgagcaggaatagttttatcacaccctaaattctgtcagtggctattctcaatactaaaaaaacgattggaactcacctccgatcattatacaagcatccaatggctgggcccggatcatctcctccgtatccatgctcataagattccgcaagaacatgcttgttggatgcgagaatgattcagccacactgatggtagggaattctatcgccagtcctccattgagttgcacgccgcgcttagcagcctcaatgagctggggcacattggcatgacagggattgaaccccgagaaagtgttgataatgcccacgattgggcgtgaaagcgcatcttctgaatagccaagtgccttgataaagactttgcggagaaagagagagaaatgaggatctccataggatgttagaccctgtcgaagtccagatgtggaagtgattgggtttgtgagatcgtagtccctattggaatcctgttcgtccattttattgtatttccttctgaatagcaattccacagaggactatcgaggaagtatagacacctgagttaggcgacttacatattcccctcctctcagtggatggtgtcatcggaacaagcccgattcggatattaatccgggccgagggggttgtacatagaattaaatttataagatctctctctctatgataaaacgctatgcaatacttccatgtaatctataccctcaacttcatcctcacccgcagctccttggtcggtcggaaagctccccagctagtcttgtgtcctggaactgagaggattttaccacttgtgggctcaatatcccataaggccacaatgccagcagtaaaagttaaaacagctcgctcgatgaggccattgttcgtcgatccatacaatccgtccgcaaagggagcaatgatgctttgatcagcccgttgttttcccgttgcaggatcagttacgagaaatcgtaggggatcatactgctctggatttgagaagtatcgagcatcatggtaatatgcaccatggggaacaatgatatcctcgccctttgcaatcttgtacgtacggagctccgtcaggccataggccgcttcttctgccgactcggaaagggtcacatcggacgccagcttcttgaacgagattcctgctgaatgaaggcgcacagtctcatagtaacatgctttcaacagcggacaagatgtaagcactttttcaatatccagagagagacgaggaggctcatcaaaggggaaacccgtctcctcgcgagttagcctggaagccatcacgtaagaagcaatctctttgcggacttgctcgagaagtgaaggttccgcaaagagatgggtaattgtccaaaaagtgatcttggtcgtgtgttcaatcagatcataatacagagacaagtgccctgcagcactggcacctggagatagctccaatttgcggaaagtccgcattctgtctttgaccaattcagagacatcgtcaagatcacgcagttcaatgccggggtcaatcccatcgtcccaagcagtcaaagctcggtgaaagactgaaaagatatggtgaagccgatcactagccgcatgtcctgctgaggctgctgggtgcggggcccatcgaggagtgccgacgaacaatgtcacaaagcaatcgtcaagtcttccaaggtcttctgagagattagggaaattctccacgaatgtcccacccatcaggaaagtagaagtgatgtgtccaatgaaattgctcacgagtgcaaacaaattggcttcacagactgtctggtccccttcatcgggcatctcaactccactgattccacgttcccaggggcattggtcaacaatgctccggcagaagcttaccaaattcggcatgtcacgctgcaccaaacgggtaatagtagacgaagcttcagtgacaaaagcctcttcattgagaatggtagtagccttgtcgctaagttcttggttacgatccaaatccagattgcggatgaggctgcggtcgccaaagacgttttgcagagcttgatcgagcacctggttgcgtggcgtggcagttttgacagagaaaacagtcttcatcatagatggagaagccacaacattgtacttgacaccgcgaatgtaaatgccaaagacaggctcattcatagactccctataatcctattaacagacgtctaggatggtaatatagtggaagaccaaccgagttcttgtaaagaaggtaacatgattccataagaaggcagggccatgtccaatccagggaaaccaataaggtgctagtcgcaccgtctgtgattttgaagggtcttgctcacgtcgacttcgaagccccgagataatacgggttgtgaggcatacgaacaccacaacagcaaaaaccgttgaccaacttataccgaaatatttctcacggacagtctgtataagactcaaggcttcgtacctctccattgtgattcgatgttgcccaaaccaaacactgccgagcaaggtagcacggttctacagcgccagcacccactcaagggctcgaggtagacaaagaggtatgaccggcaagtttggattgattcactccagagatttttatttaatatatccaggtgaagggtgaagggacacgatggcaaacggaggccggggcctttttctggcttactaagctcgagggtctcagctgggttctatttttgttggttttcatttgaatgtcaacattttcaaaatatattatgatttcgttctatataatgataggtgattctcagataataatagtcggatcaaagttgatatcacttggttcgcgtttatacttcgccgagaccgctaatagatctatatctaaataggagtccaaagaaaggactggatttagtactttttgtagtaacggagtaagattgagacgagatttatagacagtagctaaaagcttaatattccttctgcaaagactttgacaaggcagcactttcactctcatacttgagaatcttcgattgcgatccgtgaactttgcgcagaagccactcgatccgcgacgttagctcccaggggtactttggcagtgagccaaggacctgcagctcctgctcatacttcgtgatacttgaattctcgttgttaatgagctgtgagaggattaacaggtcaaggcggccctgcagggtcttgttctcaaccagacgttggaaagcagcgcgatacacgggtttgcccggtttgacgtatcgtgggaatcctttgtcagtcccgatggagacaagctctgcttgctctagtgcccggagagtgacctcgccgttgtccttgaatacatcgtcgaggaggactttgttgtacaacaggtttccatccttggagtgggcgatagacttgatcagatgccacgcctgctcacgggaccactggagtgtaattgactctgttccgaggatgaagagcttcaggatttcagacgccgactgttcaatgatacggtccacggcagctatacaatggttaatagaattctccaggtagaaaaaaagataaacataccttcaggtgtctctccggcctcaattcgatgagccatgaactccaagtcagtaactcgaccacccagcactttgatacaagcatccaagccacgaagcgtctctttgcgccttgcattctgttcatcgtcactatcgtctgcctcggcatccagatgactcaacacgaaacgacgaccaacttcgagcgagcagtcacctaaagcaattgtgcggaacacttggttaggcatggctttgctcaatggctttgcaaacgaggcatcagtcgtcaagaagattacatgggcgatatttgcggatgtcagaccagccgcccattcagtaagtttgtcgagcacgacactgtcatcctcgtcatagaggaaattgtcaatcacaacgacaggtctcacctcgggatgagcctccaggtactcatcttcggacatgttgaaatctttgtcctcctttcgtctaccttccaaggcgactcgcttcatagcaacaccagtattctgccagatcttgctcaattgcgcatctagagtctcggagaaaccggctttggtgccgatcattccctgtgcagcaaggtcaatgaagctgctgatactgttcatccaagagaagatcggtcggtagccgacctgagcggctgctcgtgaaatcttggttgtatcaccccgagcatcttgaatttgcttgcagtcaatgatgaccttatacttgtgctctttcagggcttgttccaaaaccaactcgcgtttccctgagccacgaggaccatggataacaataaaggtctccgcggtctccgttagccaggcttgcagttgtgcaatctctgtttgtcggtcttcccagatagctgctagacctcgcgggtctgactttcgcttcccaaatgagaacaggctcgctttgctggcttgtttgcgaacccactgtagcactgggttctcttcactctggaacgacgacttgattttgagagtgatgaagaacgtgcgaattggatcgaagatgatgaccgtgatagtagccaacagagcagctatagcagggatcactagtctcggatggttcaaaatccaatccctgatcataaacagcttgatcttgcgctcgtagttgatcttgaacctcgtaccggacttgccacctcctgcttcttcggaaacaataaatccgtgcatgcagttccttgccatcacggcgtacctagggcgctcgaatctcagaattgcatatcgtggtaggactttcgaatctgagggctgtgtttggatgtccagaattttaccgtaaggtcggaacaatgagtatagggactcttgggtcagttcggccgctgatttatctggcgacgttggtaagaactccacctttagggtctggcttgggattcgatagagatcttcgatccaaggcgttccgcgaacaaggtctgcatcgactttcaggaacggattgaaccagggcttaactggattggttttcaaatgctctttgattgcattttcgatactttcgtggctgatgtccgacttgagtgcatacttcacgaatgcgcctccctctttgtacctcgtcacgacctctttgatctccagatttaaatttgtgggcaaaactcgatgaacaatccgagtcgggtcggctgccgctagttctgggttgttgactcgtgccaaaagtccctcaagaggctgaatatggctgaggggtcccctcagcagccattgtagtcggtgcggaaatatatctagggctagttagtggatagacatgatagcttgcaattagtcggcgctcactattgacgtagataatcccttcgttttgtcctactgtaatatgtcccgacctgatagaagatgtgcatcgtatcatcgagcgtccccaaaccggaggtctccacccgcaggacgcattggcgctgatatgagagcgtgtgggagaccaaaaggccaacggacctttttgtaaaggtgtcggtctcattatggtcacagacacataccgaatagagagagaaagaaagaacttaggagagcgatcaagttgtgtttgtcaaattaatgacgtcggttcgtgattatcggagtgtgattatcggagtcacatgacaatattgattaccgcgaaaaagataacctcgcgatttcatggatcgcgatagatcgaccaattctttctttcacaaaacgaaatgggctggctgtggagctcaactcctaaggatcttccgaaggatgttcccaaggatattccatccacaattcctacggaatcagtaaagcagaatgcaccatcgaagaccttgacccccgacgaacaagccgacttggaattcagccaaatcctggccgatctcagagccgaggattcatcgctctcaaaacgaacagggctgactcctgatggcaatccgctgccagaatcccaaacaccttcatcgcccatttctcccgagtccctctaccaagatactatgtcctgccgcaatgccttcgactacgccttcttctgtcagtccttcggaggccaatttgtgaatgtttatcgatatggagaattacggtcatgcagcgatcactgggataatctatggctgtgcatgaagacacgaacttggccagacgatttgcgcaggagagaaatccgggaccacaaccgaaagaaagcgattaagtacaagacgggccccagcagtgaagatgtctgggatgtgcgtctagacccagccaaggactcgttcaagggagattttgctaccatgtggcaggagatgaaggctgaagatgaagcagcaaaacaacaggcgcaacagacggcttcatgatgtcccctgtttctcttctctccttgttacgatatgtagatatactcccttttgtttcattccctcatgtataatatgatactctccatttcctttgtgtatcggcgtttgttcgatggtcatatggaggacccggcggatccgcatatagcgatttagaggctttttgttacactgtatgatcttatattctcagatttgtcaatctgtctgtacgtggattctataagtctgccccacggcctataaaactctattgaagggagagaataatgctggagaaatagttgattggcgcaaaacgctcgaagagatgcttgaagaacgccgcataaacgaatgacctaaaattagaaaaaagacccccaaggccgtagacacaagagacatatctcaggatatcaataagaaaaccctaaaacatacttacctcatattatttcatagcatcgccgtgcgtctaagagctcagctgcgaagcaagcttgtaagacttattgctaagaacaattcaataagttagtatgtagcaattcaatggaggacatgtaaccaagatgatgttctccaattctctaattactcaatccaaacttcattctttcattgctcttcatcttcctcctttatcgactgcagtcgtgtcttgatgtgcttttttaatcgatcttcgatttccgctatcctagcattcacagaactgttgctgcctgtgctgcatgtagaggaggccacactagctgtaggtgaaggagtgaatcttcgcagagtcacaatctcaatccccggaccggcatcgaagttcaacttcttgctgagtctctttaccttggggctagtgggatggtcaacggtgagcttggccatagcagcagtgatatcagcaatatcagatggattgaatacaataggggtagatcgacctcccgaatccctggagtgataggtaagaggcctggaacgatttccggtccttgtggaattcttgcgcatcgttgttcggaggctaccttcgacactcctaccgcgcccggatactcgaccatcgttatagtggcggatggaccgtcgctcaccgtcgagctcgcggtcagtgatgaagccgtttggattgagatcactcgcggcctcggttgtcttcttggcttcgttgtccatgtttgcaatggataggacctgtgaatctgtaaaataggtaagctggattagctaaaacgaatgaatggaatggaatggtccgagaaagcaagggatatgaggacgattatatagttgagccatcaatgccggccatgcaaatctgacaaagggaagttaccaaaggaataagtacaaagacgttgttgactcttcagctctttgttctttcacacaaaagacatagagagcatctagctttagagactaatttcaagtaataatggaacatggtcagatttgcagaaaagctatgtacagcagaaatagagatcaccgaatggcagacgctctaaacgccttgcagacctagaaaagaagagaaagaaggagaaacccgctgaagcaaaaactaaagatagaaagaaaaaagtagaaaagtagaaaagcaaaaactgaagaaagcgcagtactgaagccttttccattcgcgcagagaaccaaccccataaatcccgtttatgccacaaatttatcccatttgatgaacttttccgcatcaaaatgaaacttttatcgtgataatggccgtcaaagtcgtaaacatgtcctgcatcgccgctagattaagcagcaacctcagtgggttggggaacggagtcgatggcaggacgacggacgataccaccggtgactgggagctgagaactggttccaatgaggaaagcgtccacttcgcgagcacactggcgaccttcgttgatacccctggaattatattagtaaattgctagttataggaattcgaggaaaactcaccagacaatcagagactgtccacggcgacagtcacctgccgcatagacaccgggaaggttggtcgagtagtagccgggaggagtcttgatgttcttgcgagggtcaagctcaatctcatcaccaaagacacgatcctcggggcccaagaatcccatagagaggagcacaaggtcagcggggaagaattgctcgctgccctcgacggtcttcatgtcccagccgccggtagcgctcttggtccactcaactcggacagtgttgatacccttgacgtggttgttgccatcgtccacgaactcggtcgacatgacacagtactcacgtgggtccttgcccatgtgtgtcttgacctcggtgtgaccatagtcgacacggtagatacggggccactgaggccagggattgtcacgggcacgctctgggggaggctgaggcaacaactcgaagttggtcaccgacttggcaccatgacggacagaggtaccaatacaatcgttgccggtgtcaccaccaccaatgacgacgacatgcttgtccttggcagagatgtattcgccatccgaaagaccagagtcgaggagggacttggtgttcttatgcaagaactgcatggcgaagtgcacaccatccaattcacgaccagtgaccttgagatcacgcgcaacggttgcaccagtggcaacaatgacagcatcattagtggcacggagagactgcagagaaacctcgcaatcagggccaacagcagtgctcgcaacgaacttgataccttcagcggccatgaggtcgatacggcgctggacaaccttcttgtcaagcttcatattggggatgccatacatgagaagaccacccattcggtcggcacgctcataaacggtgacgctgtgaccagcgcgattgagctgatcagcagcagccaagccagcaggtccagagccgatgatagcaacggtcttgccagaacgggtcttgggggggcggggaaccatccagcccatctcgaatccacggtcaatgatcgcgcactcgatggatttgataccgacggggtcttcgttgatacctagaacacaggagccttcgcagggtgcagggcagacacggccggtgaactcggggaagttgttagtcatcagcagacggttcaaagcatcctgccactgcgccctaaagaccagctcgttccacttaggaatgatgttggaaatggggcagccagtgtcagactggcacaatggaacaccacagtccatacaacgggcagactggtacttgagctcgtcctcgctgagacggtgggagatctcgccccagtcgcgagtacgggttgttgcgttgcgatacttctcactgcggcggctgtacttcatgaaacctcttgtcttgtccaagatcaacgctgatcgctttttatcggtcttggaatcgctaatgctgtcttcaatgtctagcaagtcagtcttcttggagtcgtcggtcttggcctgttcggttttgaccggggtgttaggaagctggggaagagtgaattcggccttcttcgcagcctctgccttggcagcttcttcctccatgacgcgcttgtagtcggttggcagaaccttgacgaagtgggggagagcacgagtaaagtcgagcaggatgcgagcagccagctcggagccagtgtaatggtggtggtcttcaaccaagccacgaacaaaggcaatctccgatgggtcttcgatactggagatctcaaccatctccaagttgaccttggaatggaagtcctggttcttatccagaacgtaggcaataccaccagacataccagcagcaaagttgcggccagtaggtccgagattgagtacacgaccaccggtcatgtactcacatccgtggtcaccaacaccctcaacgacgacagtagcaccggagttacggacagcaaaacgctcggcagccataccacggaagtagcaagttccacgggtggcaccgtagagacaggtgttaccgacgatgacgttttcttcggccttgaaagcggctccgcgcggggggtagacgatgagacgaccaccagagaggcccttaccgacatagtcgttggcatcaccttcgagctcaagggtaacaccgggggcgaggaaggcaccaaaagactgaccagcagagcccttgatgttcgcgtggatagtatcctgaggaagaccagcttcgccatagcgtcggctgatctgataggaaagagtagcacccaaagcacggtcggtgtttacgatatcacattcaattcggcagggtagacccttctcgagagcgagctccgattcggcaatcagcttgttgtctaagcgagtgtgaaggcggtgatcctgcttgcggacattgtaggtagcgactccagggcgcagtgagtgagcgggggtcaggatgagtgacagatcaattcgttcctgcttggcattacgaatatcgtcccggaccttaagcagctcagcacgaccgaccatctcgttgaccgaacggacacccagcttggccatgatagcgcgcatctcgttggcgacatagtagaagaagttgataacatgctccggtgtacccttgaatttctgcctcagttcggggtcctgggtcgcaataccaacagggcaggtgttcaggtgacatttctagaaatattgttgttaataggccgttcgtcaggaaatcagggtactggatgtactaactctcatcataatgcatcccaatgcgatcaaaggagttgtggcaaacccatattcttccgctccaagcagacaggcgatggcaaggtcacggcccgtacggatttggccatcggtctgaaccacaacacggccgcgaagatcgttcaaaaccagagtttgatggggctctgcggggacccaattccccatattcttccgctccaagcagacaggcgatggcaaggtcacggcccgtacggatttggccatcggtctgaaccacaacacggccgcgaagatcgttcaaaaccagagtttgatgggtctctgcgagacccaattcccaaggaagaccggcatacttgataccggtccagcgcgaggcaccagtgccaccatcatgaccagagatcaagatgtgatcagccttggccttggccacaccagaggcgacaataccaacaccaacctcagatacgagcttgacggagacacgagctcgggggttagagcacttgagatcgtagataagctgcttcagatcttcaatggagtaaatgtcgtgatgcgggggcggggagataagaccaactcccggtgtggagaaccgagtgcgagcaatggggccaacgaccttgtggccgggtaattcaccaccctcaccgggcttggcaccctgggccatcttgatttgcagctcgtcagcgtcggctagatagttggatgtcacaccgaaacgaccagaagcaatctgcttgatagcggaccgcatcgtgtcgccgttctccattctcttgctacgctcggcatcttcaccaccctcgccagtgttggacttgccacccaagcggttcatggcaatggcaatcgtagagtgggattccatggagatggatccgtaggacatagcaccggtcacgaagcggcggacaatttcggtccaaggctcgacctggtcaattggaataggcgtacgctggtcgaaatcgaagtccaacattccacgtaaagtacagttcttaatctgctcatgtgcggacttggcgtaggcctcgtaggacttgtcgttcttggtgcgaacggcatcctgcacgttggcaatgctggtggggtcgttgatatgggcctctcctccatcacgccagtggtactcgccggattcaggcagaccggggacttcgacaatggggtgcgaagggtacccgcgctcgtggaaggcgaaagcatcctgggcgatcagatcaaatgtgataccacggatacgactagcagtaccagagaagcagcgatcgataacgctgtcgtcgatgccaagggcttcgaaaatctgagcacccttgtaggactggagagtagagatacccatcttactcatgaccttgaggataccaccatcacaggatgacttgtagttctgaataaccttctcatcggagatgtccttgcggatcaagttctcccggttcatcttgagaatacattctagagccaggtaagggttgatggcatcggcaccgtatcctaacagaacacaatggtgatggacctcgcgagcctcggcagtttcaactgccagggcggcaagtgatctccacttatttcggacgagatggtggtgcaccaggccggtagccaacaaagcagagactgcaacacggtcggcggatgtagcacggtctgagagaatgatgagcttgtcgccattctggatagcttcagtggcactgtcacagatggaatcgagcgcttcaatgtaaccagcggtgcccttgctcttctcgaatgtaatatcgatggttcgcacagtccaatcgttgtgggctatgttgacattcttcagagcattgaactcgggaatgctcaagatgggagagggaagacgcaaacggtgacattgcgacggatccatttccagcaggtttccctgggggccgacgtaacattcaagggacataaccacagcctctctgatggggtcaatgggagggttggtgacctgagcgaagagctggcggaaatactcgtagagtaggcgaggctgctgggcgatacaagcgaggggtgcatcattacccatagagcccagcgcttccttggagtctgcggccatagggccaagaatcaagctgacttgttcaaaagagaacccgaacgctcggaggcgagggtcgttctgaatggtgttgtcgtccaaggcaaaagaaagatcaacgttggagtcaagtagcacctgattgatagcaggaagcttcaaaagtcccttgtccaaccagccggcgaagtcctggcggcgggcaacagtctgcttgagctcggcgtcatcaatgatccgcccggccacggtatcaacgagcagcatctttccaggctgcaagcgacccttttggacgactctctcaggatcaatctcaatagcaccaacctcggaagcacagacgatgcggtcatcgtccatgacgtagaaacggcagggacggagaccattacggtccagattagcaccgcagtagcgtccatcggagaaagtgaaaagagccgggccatcccaaggttccatctgacaagcggcccactcgtagaaagcagacttggctggatccatagctgggttgtcctgccaggcctcggggatcataatcatcactgcctcggggagagacaaaacgccgttgatcatgagtagttcaagcacattatcgaacgcagccgagtcagaaccaccatcctcaacgatggggtagagcttgtccagctcgtcaccgaagacctctgaccgaaggacaccctcccgtgcgcgcatccagtttttatttcctcgcagggtgttgatctcaccgttatgggcagcccatcgtaggggttgggcacgatcccaggatgggaaggtgtttgtcgagaaccgagagtgcactagggcaaaatggccctcgtagtctacgttcactagatcgtgatagtacgtgtacacttgaacgggggagagttgacctttgtagacgatgttccggttgctgagagagcagaggtagaaccagtttccgaggccgatgacatgagtggcacgcttccgtagaacgaacagctgaagctcaaacgttctctcgtcgaatttttcagtgtcggtgatctccggcttgttgccttcgccatatgccgatttcaagaccacaaatggctgcataatgataggctctcgagatagtgcggcaggaccaagaatggttgaatcccgtggtacttcacgccatccaagaactcgcaagccaagggacgtggccagttcctcaaagtccgcaatggattgcttgagggcctcctcatcgggcttgaagaacaagttgccgacagcatattgtcccaacggggggagatcgacacccacctcacgggcgaagttcttaatgaagaacttgtgtggaatactagtcatcacaccagcaccgtcaccatcccgtgcatcagagccaacggctcctcggtgggtcatgttgcacagcagattgcgggctgttcaattgctgtcagcttgatgtcttctcacgttgaacgcaaagagcagaacgctggcactcaccatcgctaacaatcttgtggcttgccttgcccttgatatgactgatttgtcggtcagaattgattttggtccacatgcctccaattgggcccagttgtaggggagatcaactcacgctgcgaagcctacaccacaggcatccttctcatattcagggtcgtacagaccttgccgctctggtagagcattggcccagccaaaaccctttttgggttggtactgagaatactcatgaggagcctgttcttcacttatatctttgccatagagctcctccaagttaagacccattcttccgccgggagccgacagagaatggaatggtaactgaaggggactgtttttttgtttttagaaagaccccaccgatttggggattgaaagctggtgatgtcgtcacagggtatcgcagggtgggtgagggaggagtaaacgcgtcaatggtcacccagcttctgcgagagagttgaagatagaagaaggggggaaggtgagaagagaacctgagaaaaaaaaaaggagggggagagggaaaaaaagatgggcgattacggcgggacagtaggtccggggattgcaggccccgatgtacccaaaagggaaaattacaatggtggggagttctaccgtggcaaattgctaggtgaaagcagccaagagaatggcaaggaggttaagtgaaagagatatgagaacagtcaaacctgctacatgctacatgctcgatgctatataatacaacatgccatttagaagctcttcactgtgaacagacattttcgatataagagaagtcgagcaccgacggaaacagcccagagagccagcgtattgataatcattatgattacggagtgcaaatcatcccaagataagcatcgctcgaccaatcagaatgaagattttacgatctagggttagctctttactacgtcaactaactttacgggggtgtcactatatatgaggatatcagatttatacatctgctactccttcttctcgattcctagatccaattcatgtccacttcactttcctctttctcgattctcttcaaagctcacaaaacaaggtctagtgggccgggcggccccataggcccataggcccatagacccataaaaagctcagaggcgttcattggatatatacatacaaagtgtacggagtacggagtacatactcccgtccccgaaatagggcaaatcttcacatgtgagagagagacccgggtgaatgggcgcactcctcagtggggcaaaaatgtagtgcttaatccattcggttttgaaccggtttgcatttagtctgcatatctgcagggaacctggaaaggtactagagaagtaccagtaaaggtacagatctaaataagagatctcaaaaggaaaggataattgcagatgtatcgagtatggagtacagtatacatagtaaattgtttgacatcttaatgaaatgcataaatacctgtaacggtactccatactccgtacacattccgacaacggccaagtccccctgtcccgagtttcccctctctatcactttcttggccttgtacggaggagatgccagatagcccgatttcggggccctgaaccgtttgcgggttgccctctccccctcgttctttaggccactcagactggtacttaccggatatccaaataccagcccatttactgagaatgcctatgattccccattttttacattgtataacgtggacgagacagagtccggagggaaagtcatccagacatgtgaagacctagagataaggtagatgatgataataagaatacataacttttctctgcggatatcttctccccttttcgcctatctacatcgcatattgcccgctactataagtatcccgtacggagtactccgtactgtatctcaatatgaatcgggtgaaacaggatcttgtttatacttcacacacaccaattatagttaccgtattatttcaatcaccataccccggaaccagagagtggagattacatgatccccgccttttctagaccaatcagcgttgagataaaagtcagacacatccaacgtcatgatttcgggggaggctagtgtccatccggctttttccggatatcctcttgtccactttaggttcaccgggttgaccgctggcatcgggtgattccggatatatagatattcaccacctcaccactagatcttgccacttggtgagtcagtttgggattctcatggtgtacaactcgagaactagaactttctactcaggtagttattcggccgaaactgcgcatatatattgtatgtagtgtaagattgatgaaaggccaacatgaactatattttgcccttgggactgaaactaaacatacacttggtggttttgattatatccatccaatatagactattgttaagagcgatgaatattttcagtgttaataggagacagatatactactagaatatgattaacctcaaattgccaaatagtctgtgtatatatatacacggagtatactgcctatatatctgacgatctatatgtatgctgtagtaagttgtatatactccgtagggttgacggatcccccgcatagacgaattgattggcggtggagctccggcttttttttgcgttcgcgctttctccgaccttgcattatatcgtacgcctatattgacatctgcaattgttcttctctatagttatcctcttctttccaacataatccgatttcacatgcgtcccgaagtcctagcaacagtgggcctagcaacagttgcaactccattcgccacaacataaacaaacggctacaaagcactgtatctccaagtcgcaagacatccccgcaaagctctataagcagatacctcaaaataggcagagtattcgcaaatctagccttgaaacagcaattattgcagcgatgctcaccctttcgtccatcaccccgcgcgacgtaagtgccaggctctgccgattcaagcttctcaatcagccccggaggaaactaacaacttgatagtcccatgaactttggttcggatcttcccagccatatcgctccacctccgatcaacaggctggcgacaactccgctgccaaccatctcgcccgacgcaatgctggcggcacgtccagcagtaatcgctcattcatgccatcccgctctcctgccaacacaatcgccacactggccgcggaagaacgctcgctacgcgctcgaaaattgaacatcgcgtcgttcgggtactcgtggatcaggccggcggggtgcgccaagaccatgctcgggatgaaagaggaggaagcagagcgggaagaggcactacaggctgctgcggcggagttggaagctgcagagggagaaggcatcatggatgatgacacggggttacagagaggggaaataggggaggaggaaggcatggagcgcgatttggatgacgatatccccaacgcggaggaggaggcctcgggtcttatcgaagaaggcgaagaagggcttgaggaagatgacattggtgacgaaggggaatacatggagcgcgacttggatgatgacatccctgaaggcttccccgatgacgactatgagggctcaggcctgtatgatgatgacgacgaagaggacgatttcgacaaccagcctgatttagatgcggacatacctactgccgacggtgagagtgtgagcgaaggcatgacgcgcgacctcgacgatgatatccctgatgcggcagagcaaggctcggagcaagaaggggaatggcagcacacagacagcgaagaagagctgagtgatggagaggaaaacgaaaccagtattattcaaaccaggtttcccgagaacttccgcaccagtacgccaaacactcgtggtttgcctccacctccgactctgcgccgcgagcccgagactgaagcccagcgccgtttcctcaatcgctggagcggtggtggcgatgcgtttgattctagcagcatgctctacagcgacgaagagctacgcgcatccataaccagtcagggtagtcgacgaagcgggtttgcgagaaggttcccgcggcacatcggtgggcctagggatagtctgaactaaagacatccattataatggtatacttgttatgttcctctgcggcgttttgtgtcagcgtaaaaggatagatcttggggggtctatctcggagttttggtggcaacttatgatacctccttgtaacataatatattatatgagcaagttcaatgaacgtggcttcaaacgcattgtgaatatccacagtcctggaaagtaaggctcaacacgtagaatggtttgttatgttaaggcagtccctgtatattgttttatatgcattatgtacgggttacttgaaacatcttccaatatcaaagccatgacctctcctgaattatctccagagatgaaaaccagacaggtcccaacttgttgacttgaaagcggtatgtaagccaatggcagggttttgcattattgcatatacatagctcaaagaatccatagtcccaaaacacctcatagcgccaaagccaaggtttccatgctgaagaaattgaaaagtcatgtgcgtgactcgattaagatcaagtaaagagcaagtcgctgggttttccgtgaagtaagacgagagattaaagatgataaagacaagaaagtcgggcgtgatcgacatggtatagagcgcgagtgcagtcttagaaagacagcaagggtatacgttcagaatatccacacatagaagaacaagaggaagacagcgaaaaagaagccgagccagactcgccagccgatgccggtgctctcggccatgcgaagcatgcggttcatattcccccgcagtcggactcgggtgttatcaaatgaatcgttgaggtcggtgatatgtgtggtgtctcggatttcatcgccaattgcaagtgtgatctagatggttttcttgtcagcggtttgttatttcaaactactaactgccctagttgggtctggaagtatgggtgcgaggcttcttacatccttcaacattttgaccttggcactaatgccctcaacttcggcgtcattttgtgactcaagagatgagagaactgcatcggagtaatgtcccctatatcaaagccttggttaacaactatacatgaaagaacgacgggcgatcttaaaagatcatgagccattcaacgcactttttgtcgggcgatgcgctttgatatccacctccagctgcaccgctactcgcataaccattaagtgctggactggggtagcctccgtacccgtatccacctggttgttgggcaggcgatctgctagcttggcgtgagtcgccaccgtattgatcaaaaagagacgaagaggggcggggatcacgttgacgcggaaagctattcagattaatgctgcattagccgactgaaggacacctcataacgaacggagggagaaacgtaccgtgaagccatgacggtcgtggagtgtagctagagttcgcgatagagcaagaggaggaacatggattgcagatcgataagctcttcaacggcaatcgagcatctcgcaagggtcaaacgcaagtctatcactgttcgagtcctcgatgtttgatgcttgcggagataaaaacatcaaagtggccatagcgttatcattcgctgaacagcacgtgatagcccaagtactggaaaccgacacgcgggatacacagcagatgtggttcgcatgggcatctgctattgtttatctggtcatttaggattgattatggaatgaaacgggcaaagcattgctcattctaagctatgccttggagatatccatttggtctacaagttacatcataggttaaaaatgggccaacccgtagtcaatggattaagtgtatattaacggggttggaaaattttttttccgaagagatattcattgattcattgtcatcacagaatcgcgagacatgttttggacacacgggaaaaaaacatcgtggaccgacccgtggcgcctatcgttcaaagcaattccatgccacccggaagttttgtattcatcgagcttagtcgcgcatctgatcatcatcgttggtctgggtgtcctcgcggacctcgtattcctcatcgtcatcctcgtcgtcctccatctcgtcggtggagatcttggagtagtcaatgaccttgccgcgtgtgcgtcggccaccctggatgatgttgctctggtcgatggggtcgttgagattgtcttgtgtgtcatcctcttcatctacagtataggaacagaaagggtcagtatggaggcaattggtggccgttcaggcgcatgtggtcattcagacatgggttgcttgggtgacagtggggtacacataccattgtcggcctggtcacacgcaaggaagtcagcataaaagaagcaattgcgcgtagaaattggagactcacaatctcgttctcgctctcagactcgctctcctcgtccatgctcatatcttgggtggggtcagccttgcccttgcccttggcaaaggcctcgtcgttggagttggaaatagtcgcctggtcagacataatgaggtttattcagggggtggatggagaattgtaggaaggatggttggtggaaagggacaaggggaatttaaaagacggtctgcaaagtaaggtctttccccctcgaaccaaaacaagctgcaagggcgctctcgccgtctgattggcggtcgcgggtgatcaaaccccgtgacaaatcctgccctgaggcatcaagtacaagtaccaatagaaagaggaactgaaagagcaaagtaagtaaactattggaaatacctacataacaaaatagacatatctaacttgttgatatgggcaagcgatagtcccaggctatcgacaatattacatactagaacgcttctttgtctgcatttgtgaaccatgaagaggcaaatttcatattagaacttatgatatcagctattcttctgtcaattacgaaagtaaatcagctgtccagagcaaagcatctttccacagacgttgcattattgccccaccattttggcatcgagacttgcttccccgctccgaaaaagaagaagacgagcaacatgttgaggttgaatccagcatcaaatgcagcagcaatcaggtagttgtatcgcttccagacctcgaaatggcgacggtaagcccaatacattacgatatatccaccaataatggcagatgtgtaaccagtactgatgttaccgtagaacatcgccaatcccccaaaaaagatactgacgttccacaagtcaattcgaagccgggggaagaagcggtgaaaacagaagagaataggaggaatcaccgcccctacaaggaatgaccagggaagcacggtcatttccgtctcagcgaaaagcctctttggaccaagtacagcgtattgaactcccattgtgttggaagtccgcagggactgtcctgtccattgattcagtggatccgtttttttgccagtcaaataatctcctttggtgtccatgatccaacgcatgacggcatagttgatcggaacacccatacaagtgccgaaaatttgcgagaagaaaaccgcgcggggtggaatgtgcatgtagtggccaatcttttggtcctggagcatatactgtgcacgataccaggcgtcacctgcaatagctccatagaccgaaggaccacaggggtgttggtgagccttgccggcttttgtatgaaccatgtagccatacatgagttcattgaatgagccggtctcaagttggtaattggaaatggcgtaaagccaagcaaaggggatgaccagaatggcagcactcgaaagtgtcacaaacaacgtccaaattgggatgaatagatgacccagtgcgaagaatataatcagaatcacaaaagctaccgaaaatagaataccataccaccaccatggaatctctttgtattgtctctggataacattgagacggtcgtgatactggtgatggatgctgtcgttcttcgtggatttctctgcgttgcgggatgaccagattcttcggatattcccggaaatctgtgcgtatccaaaggtcaagatccaagtgaccgctgctggaagtttcgcgtagtcgaagaacgtcgcccacacattttgcaagcccatatacatcggcccatactcctcgtaagcggtcacgttcagatgatagtctggggtgagtacgtccagggttgggtattctgtaccgttgcttaggaaaaggttgtttgacatgagtccatgcttgaaggaacctagattcccccacttcgctgcaggaagtaggacccaacaattgaaagcaaatgccaagaacaagatgacctgtgtccagtatggggtcgtcatgattgaggatccattccaatttacattggaccaatctaacgagagattaaggaagcccatgccaccaattcctgagccgataaagttggccaccggattgcgaggtgccacccagcagaggaaggccagagatgatgtgaatgggaaaacatactctggaaggaattgccacatggtcatccccagaagcgcgaagaagaaaaccttcatctggcgccgagcgagagcagaggagttgtctgttttgcgaaaagtttcaaacaatgtggtttgcatcaaagcttggggccagatgtattccgggtcaggcaaaaggagttgtcgggcaagcgcagcaaaggagtaaccaatccacacaattgaaagcatgaagaagattgcaaccgccggattgattcgtgtaccgtaccaaagctctgcgagcacgatgggggcgtatcctagattgtacgtagccccagatgctgcagtcaatgtgaccaggacatgctccttgatgctccatggggccggattcaggctaaaagaaaagcgagtaccaggtagaccgatcctccagtcaggaaggactctggccataaagtgcccggcatagtgacaggcgatttgaacaaagaagatggagtatggtgccgtggtagtgcggaagtgactcatctgcgacagaaaggcacccggaacaacaaagatgatggcgagcacaaagtaacggaaggtaattgtcggtaagctggggtcgtcggtcaaattgatcagatgtctcacgggcaagggcaatgcagcaatctcgggattatcgtgtatttcttgctcaatggcggctgtttctcccttgaaatggaggttctcttcgtctaccgcagtctctgccacctttgggtctttagagaactcggagccttctgagcccataatctcttgttctatttcgacctcggtgggggtttcctcgagtctcttacgcttcagtgcagcgaacatgtttaagaagatttccgatagcccatggaatatattttgcatgaagttatttaaataaaatagctcatgttgtgcgactggagtaaatattcgcaattcccatagagaaatgccccattggacgagtccaggctaatgccatcacatcgttacagctacaggggtgcggacaaatgcttagcgcggatggcgcaagccaaaagctttttttttttttaggcttaaaaagaataagaaataagagggaaaatagggaaaatagggctaaccagtctcttgtttagattttgtagatgatactccgtatatctagaatatatatatatacttggcaggggaattatagggttgttccaaggttcgttactggtatgaaatgaagtatataattgctacgcttcgctccgcaataagaacaacatagattggatgaaatagtttttatacatagattctgggctatattatttgaatgataatatattaggttctgtgagtgagatcaaaagaaataactagacaacatacaacacagtcttcgagttagttaggaagttcacctcgacatgttgagatcgacattttagagaattcaggttctgcctcaggctgcaaggggcgtacagattacgtcagccccacttgtgcactgaccaccggttggtcatatgaccgccgagtcgtacgttctgatttctgcccggattccccgcccggaccggagaaaccccggccgaagtcagctggaaaactctggtcgaacggggtgggggaagtggtcgggtcatgaattcactatgacgcatacataattgacagtaccagtaccaataataccggcacgagatggccaccacacagagaataccaggcggtccctatggcgacgtgtatgcaggctgtatcataccacaataccacactctgacaccttggaagtcagcccaccattacatcatacagccccgccataaagaaagctgagaacggcaaagaaaacccatatgaatcagagaggaaaaaaaaaaaaaaggaattgacatcgtcgacgctaaagttagacataatcaagtaatgtagacacctcaagactccactgggctcgtctggaacctactagagtcttaatgaaggacgtaatgaggtggttgttgggccatcgaagctcgtggaatctcatggattcccgtggaaggctccctctagaagcttctggggcaatacaccgctcactatatagcagcttttcgcagccttcaaccctcttctcttctttcctctctcactatcaaatacccttctactctctgtacactatcctcgtcagtgaccagtctctttctatcctttttttctttttaacgattacacacattcaccatggctcccgccgtcggtattgatctgggaaccacctactcctgtgtgggtgtcttccgtgatgaccgcattgaaatcatcgccaacgaccagggtaaccgcaccaccccctccttcgtcggtttcaccgacaccgagcgtctcatcggtgatgccgccaagaaccaagtcgctatgaacccccacaacactgtcttcgatgccaagcgtctcattggtcgtcgcttccaggacgctgaggtccaagccgatatgaagcactggcctttcaaggtcatcgagaaggctaccaagcccgtcatcgaggttgagttcaagggtgaggtcaagcagttcactcctgaggagatctccgccatgatcctcgtcaagatgcgcgagaccgccgaggcttacctcggtggcaccgtcaataacgctgtcattactgtccctgcctacttcaacgactctcagcgtcaggctaccaaggacgccggtctcattgccggtctcaacgtcctccgtatcatcaacgagcccactgccgctgccattgcctacggtcttgacaagaaggtcgagggtgagcgcaacgttctgatcttcgatcttggtggtggtactttcgatgtttctctcctgaccattgaggagggtatcttcgaggttaaggccactgccggtgacacccacttgggtggtgaggacttcgacaaccgtctggtcaaccacttcgtcaacgagttcaagcgcaagcacaagaaggatcttaccaccaacgcccgtgctctccgtcgtctccgcactgcttgcgagcgtgccaagcgtactctctcttccgctgcccagacctctattgagatcgactctctcttcgagggtgtcgacttctacacctctatcacccgtgcccgtttcgaggagctctgccaggacctcttccgcggtaccatggagcccgttgagcgcgtcctccgtgacgccaagattgacaagtcctccgttcacgagattgtccttgtcggtggttccacccgtatccccaagatccagaagctcgtctccgacttcttcaacaaggatgccaataagtccatcaaccccgatgaggccgttgcctacggtgccgccgtccaggccgctatcttgtccggtgaccagtcttccaagtctaccaacgagatcctgcttctcgatgttgcccctctttccctcggtattgagaccgccggtggtgtcatgactcctttgattaagcgcaacaccactattcccaccaagaagtccgagaccttctccacctactctgataaccagcccggtgtcctaatccaggtcttcgagggtgagcgtgcccgcaccaaggacaacaacctcctcggaaagttcgaacttactggcattccccctgccccccgtggtgttccccaggttgaggtcaccttcgatgttgatgccaacggtatcatgaatgtctccgctctcgagaagggtaccggaaagtccaacaagattaccatcaccaacgataagggtcgtctctccaaagaagagatcgagcgcatgctttccgaggctgagaagtacaaggaggaggatgagcttgagtctgcccgtatccaggctaagaacggccttgagtcctacgcctactccctcaagaacaccctttccgagggcaagctccagatcaacgacgatgacaagaagaaggtcgaggacaagatcaacgaggtcatcggctggctcgacagcaaccagaccgccgagaaggaggaatacgagtcccagcagaaggagcttgagagcgttgccaaccccatcatctccgctgcctacggtggccaggctccccctggcgctggtgcccccgagggtgctcgctccgctgacgaggtcgaggagaagcccgaggagcttgactaaatgtttcgctctgaatgacttgcttgtttgccatttggcactcgcttccttttcacgtcttgttttacgaacttatgggttatcaaggtttccttttgcgcatgattgcatagatacaaggttatctctttctagggaaaaaaatcctagtgaatcaattttcttttaataaaaacacaagtctcttgtacattgtagatcatagtattaactaactggtcttgttggacttaggccccattcggacctacctccacacttgcattgaagagtgaaggtatacaggattacatcctcccggaacctcgcgcaagtgatgagagtgaccaatccatacacgacggccagtatatatacatatagaaatacaagattcaaccatcaatattaattctctttgcgaggatctcccaaaccaaaactccaaaccgatgatgtatcaaaatcccgtttaaacatcctggaagtctccgttccaccaccgctgtaaccgatgcccgcccgtttgtacgatgcttccgtatgtgatttccgaagcgcgctcggggtactgctcgcgctggtcacggcggatgcgggtgagggcagcagagacacccatagccagggcgaagaggggatccgcgatcctattcatatagcgttagaatgatatgtctctcttgtcggagacagttggactgtgcggaagtatgtgtacctggagatgaggtagacaggcatgatctgctgagatttgggaaataaggtggtggtttcggtgattcgaggtgttatgtcgtacatctaagagctagaagagaataatcacgtgatgcggacactgcttgatcggttcatggccctccgtcttccacagcaacacacatctccgccatgcatttctcgctctcctctcttctcctgctagggattagcagtctggtgtctgccagctctttgacaattaccattcccgtctctagttccctcccaaacccgcatgtcctccccgcaaccagccatgccactctcaccactctcccctctagtgggaaagaccacatcctgtccgcatcgctgactcgctcggcgacgttcgtgttccatgatcttccatcctccaatccggatgctcagcccgagtcctacttgctcgatatctgctccgctggtggctacgtcttcgccccctaccgcgtcgatgttgcggctgatggatccattctcggaatctgggagacttttcgcgggaacccgtgggataaccgtggtgcggagaaatatgtagtgggtgttactggaaagaagcaagttgacgtggttgtcgaggccaaggtccttggacggaaggtcttctatgagcagcgtgctcaatgtgagcttgcctcctcttccccgcagatacaacctgtaatatttgtccatagctgtgctaactttgtatcgaatcgcagtctctcccttgagtcttgtcaagaacccaatggttttgcttgcagttgtcgcgctgggtctcatgtttgtcatgcccaagctcatggataacagtatgtctattccccattgaccctaatccaatgttgggtgcctaactttgttgtccagtggatcctgagatgcgcgccgaatttgagcagcactctcgctcctcgcccatcaccggtgccactaccagtgccatggctggtggcgggtttgatctggccagttggatggcgggcactggtgcacctaaccccacggccagcgatgtgactcaggctggttcaactggtagagatacgagtggtcctgcccggaggcgtggatagaagatcattgctttattatattgaccgttcttgacatggtatcttgtcattgtcacgtggctaatagtatgatacaaagttcactgaaggtgctcgtggctcataaaaatagagccgaataccgataaatgactagagcgatttaggcgaaacaaaagcaatcctcccaaatccctcccgatgtcaaagcgcctagagtccctcgagatgtacagaggcctgtcccttatgccggagtccatcctagtaacgaaagaagaaaaaagcagagcaatcaaagaaatcgaaacgcagccgagcttagaagtcgtctcctccgaagtcatcaccaccaccataatcatcaccgccaccgccgccgtaatcatcgttatcatgatgatcctccagagcatcggcgatcagcataccgccaagcaaaccaccaccaacacccagagcagcagcaccggcagttcccatacctcctccaccttgcctgcgaggcggttgctgctggtcatatccaccccgctgtgggtatcctccatatccacccccgtatcccggtccgggtccatatgcaggttggccatgctgcggaggatagccaccgccaccgtagtaggcaccagggggaggaccttgctgagcgtacgaggcgtattgttgctgcggccgaggtggcctactgcttgagctcgagctcttgcccatcagcttgctcaaaaacccacccttgctgcgcttctgttcctgctcaggcatcgggctatgcgacgacgctggaactgccgcatatccccctggaccggtggactgcggtcgcgaggtatcgttgtagtagtctgatgaggcgccacgatctcctaatccggccccggttcctcgtgtgtcggcccgggcgtcttcctcggcttggagcttggcggcaagccgtgcgtcttcgtcaatcgtgttagggctagtgttgcctgggccagtatttgttgaagggttataggggttgtttgatcccatgtgtttcttctggtcccccgcactggctattgctgctggatcgcctggcccggcgttgctgtatgatggtgggagagaattggcttcggggcggtcccattgcgatttgcccgtggcaaggtctacatagaacctgtgtggttgtgagtactttgctctttattaagatgagtagatacataccaagcgtggtatcgatcgtcatactgcgctgtccatccctcaggtaccgagggcgggggaggcccggaaggcggggcaaacgacatgatgacaggtattattgacttgaataggttgcaaggctgaaagcttcaatggtggtaatgatcaaaatgtcaagtttgaaaaggaggatgagagatgagtgagagagtgagagagtaagagaaagagtgaggagggagttcttgattcttccatggatatatacttagcggggagtaagcgggtaattgtggccttaggcatatagactgcgcctcccctggtggcggtgccccaatgtcatcattcaggccatgaccagtaagttaatcatggctttgggagttagttagggcagggaacatttagatatacatgcactgatgcagcctctgtccttgacaacgtactataccaatctgatctatttggcccaatataattcccccttcttgggattgggcgtcatgcaggatactataaatcgtatcaccttttctctgtgtacaaggttacaatgtgcaaaacaaaggaaatattcgatcttcggagtagtatgcatatacgttgagtatacatttggattgttgacatacctaaccatctactttattacatagtccgatctatagaagatgagcagagtggtattgtatgtatgaaaatggagaccaactatgcctaattgagtagttcacaggaacctgtatatatccaagtggaaggttctcttctgactctgctccttcctcgatctcttgttccatgccatcggtcctctccctcctcctcccacctcacttcttcttctatcctccagtcccaatctcgtctcttctcaccttccactacttcctcatctccaaaagttcccttatgtttaccatcatctcgcaagaatctgctcggaatccttttcgttgcatgtaaactcacttggtttccaacgagcctgtttgtcccaaccttcacgcagcgacttcattactttttttttttcgcctttcttctttgctgtttctatctctggttttgtttctgttttactttaatctcttccagttgacaacatgtctaccctaagcggaccttcaacacttggtcgaatggggaatgggggatgttttacctccaatgataccattgatgtgcgaaatctttcttttggacacgattcctcggtatgcttctcgggagacagctttgaatcgattctccagcatgctaatcacattggtcgcgacagaaccctcagaactcgattgctcattacggttcttccgatacggctgaaacatcccggcatggaatgttgcagtccttgtctggtgaaggggctgagcactcgtcgagcaaggtatgtgtttcctctggtgttgactcatgcgtttgggtgtctgtgatctcacaatcctagaagcagaagctagatcatatcaaagttgaacctttgaacggacaaacatcggatcttgacagaatactggccaagatttcccccaaaacacaacccctttcacgttctgaaaccgatcgctcttctgtttcgtcccagatcactccagttacaacggtgtcaactttaaccctcaaaaaagcccccaatccttacccccaggaagacagaacggtggagctccttcgtcttaggcaggaactccttgctgcaaattccaagattgctctgcaggagcaggagcttgcccaaacccgcgtgataaaacataccttggatcaagcccttggtccgtcatcagaggctgatttcggcagccgcgaaattacagagcagaccattagtcacctgcagaatgcttttaatgcatcgagctctgcattctctcactgtcaagatgcgtggagtgcccaagacgattcgcaatctgatgtctcggatccattgtctacaggagcttacaatagatctcgcgcactctgggcccagaatgaggctgccacagacagagaatacggagagagcctttcaggcaccagcagctcgacaagccaggagccaaatcggttctggggagtctcgaatgtgtatcctccgtttcccggcccaccatctctacaatcgcaaagaccacactcggggtccccagctagtccatgtggattctactcacgtcccattggtgaacagatgttgtgtccttcaggacccatcactggggctcgtcgctccatcactcaaaacagtaggggtggatctctattcccaattcagtctactccttggggtgaatttgcttctgggtcctccagtgagcagaccgtcaagtcacctgcttcgccgaagagacctcctagcgcctttcagcagatcgggctttactctgtgccctcttacccccctcgaccgattggcagccccctttcacctactgctaccgagtttacgggtaccaacacgaatgaaaccacatggaccaactcggtaagagataaccatgtgcatcgtgtttacattcattctaactcttgtcagacgagcggcaattccatccagacgtacgtgtccccactcgagccactcaactatcgacgcctgctcgacaagaatgtgtcgtgtgattggaagtacattgtagacaagatcatctgcaacaatgaccaacaagcttcaattttcttacagcaaaagctcaaggtcggcacaactgagcaaaaatacgacattatcgagtcaattgtgcaccaagcctacccactcatggttaaccgctttggaaacttcctcatacaacgctgctttgaacatggaactccggagcaagtcgtcgctatcgcgaatgcaatcagaggaaatacgctggacctcagcatggatgcatttggctgtcatgtcgtccaaaaggcgtttgactgcgtttcagaagagcataaagctatcatggtacatgaacttcttcgcagaattcctgagacggtggtccatcgatatgcgtgccacgtttggcagaaactcttcgagctccggtggagtggtgagcctccgcaggtgatggccaaagtaaatgacgcactacgtggaatgtggcacgaggttgctcttggagagacaggaagtctggtcgtccaaaatatctttgagaactgtgtggaggaggaaaaggtgagactccccgtcagataccatacgcatcaagccccttgttttcgctgtcctacttctctgttggtcctttatattgattatgccaatgctaatctattgcagcgaccggcaatcgaagaagtactggcgaagatcgatgtactcgctcatggccaattcgggaattggtgcatccaacacatctgcgagcacggtgctccccacgacaagagccgtgctgttgagcatgttcttcgttggtctgtggattacagcatggatcagttcgcgtctaagattgtggaaaaatgcctcaagattggcggcacagagtttatggatcattatctctctcgtgtctgcactggccgatctgaccgacctcgcatgccattgatcgacagtaagttgcttaggctttaacgccgtgaaaacgtactaatttttttttagtagcgggtgaccagtatggtaactatctcatccaatggattttgatgaacgccgcacctcatcaacgagagctcgtggcgagccacattcggtaacactccctgacagtctattctactttgagtggtctgaagtctaacctgatttaactaggaaacacatggtctcccttcgtggctctaaatttggctctcgtgtggcaatgctttgctgcaacccgtctcatgctacacgccctggtcctggggctggaatgcaaattggccgtttcaacaatttcaacgaagacaaatttacgaccacgagccaatccggtggtcgttttggccggggacatcaatggggaccccattatgcgccacttcgttgagtctgcctcttaatacttcatgttccctttgatgggcgtgcaaaaaaaaaaaaaaagagcaaaaaaaaaaaaaaaaagagcaaaaaaacaacaacaaccagaatcaacaacgaagaagaaaaagcaccagttaagcatttcatctcctctgctttcaagcagacagtctgtctttgccggtttgcctgactgtgtcttatcaatatctgtcgacccagttcccaattatccaatcatttctgtgtctcaatattgtgagttatcattgcttgccgatttattcatttggcttgctatccccagtggctatcatttcattcagtcttatggattgaagcttggggcgtgtcacgttaaatttctcttcaagaaaaccacattgttattacccaaattctaatcgaatatttaatccatcatgaaccttatgtggatagaatatcatttttagggagcagcacttggagtgtccacttcgtccttttcccatggtttccgtcgccgtggtttctcactggaaatatcgtggccactaagcaccgtgtctgggatgtcctggatcccaggtattggttgtcccgtagtgatgagttccacaatgtgtgcaaatgacgatggataagcaggttcagaacgtgttgaactctcagccccagatgtgcttgggtcggatgccttggagatttgtaagtctgtgttgcccagcccttggggctccgttgtccgcgatgccaaccacgacttgaaggcagaaaagtcaatagccggagtgaggttttcttttctatgctaatattagtacccaacccattttgcgtatatatcctcgacctaccgtgagaaaaagaaacacttcgcttttaggacaaggtcgtcatcccggttcatctccacctcggtggcgggggtgtcggggtgaccaagtattattgagaggccatttgcaaactcgggatccgatatgaaggggtaagaatgtaatctttcaaatatctgagcttgcgaggcctgcgccattgttcgatgaagaatacacacagatatctgagatgcggaggatgcggaggatgcgtggggcaatcttagttgtaagctaactactccgtagccgaggctcgtctgctctagtgcgctcgccaattgtttactctgcaccatttgaccgcatagagccttttctactcacctcgagaaatggtgaaagcgacatggcacttgcgagagaaaaagattggtatatacaaacgcctcacccattccccatgctaacttttggcccttgaacagaacagaaaaatccagggatatcttgcgacgccaaactatgcaatattgagataattccacaccctagaccatgatatccattccacctgacgttgggttgggtgcttcagagtgcagggatgtacttttactttgacaaccggggcagttatgcacgacctcatgggcaaagagatcgcagtcgatacaaaagtggttatgacatgcggtacactcgtagcgactgctcacactcattcccttggtctggttctctgtcatttgccagtgatcctccaaaggcacggacggaaaagaaagaccacaggcaaagcaagcggagcttcgcgaggctcgacgccacggcacctcgacccagttgatcaaggggaatagatgatgatacgatcgtgccaaatgggttgaaaggatcaaagtgagcccacaagatgggcattcggcaggaagactacacactttgctgttgcatcgtgagcaaagatagcctcctcgtgagggctttgaatggcatgcacagagcgagggataggactccactgtacgagaagggaaccccatcatcagcaatgagcctgcagattctttctgtgagtaggcagctgggggtgtagtcacgtccatcatcagctcccggaagtgctgctcattcagtgctactccatatgctgtttcatcaccaccattggtttttgtacaaagttcccggcaaattgcaacctgggctgcgagccccaccatattaaccctaattttgtcgctaatcagggtatctatcgtttggtgaatgtctccaggatcggaggaaaggagggaaccatatataaatagcacttctcgagtgccatggctaggtgtatggctaaattcaccaattagtttcgtttaaatcccccaggtttcatgtagccagtgtaaacacatacaaaagagcaccacgtgccatctccaatccattctgaagactaggcaaacctttcggatcttgtgttttgagggcttgaatggcggtgaggtgttctgttggatttccactcatgtcactgactcggagcgcgagaccatctctcaggccgaggacaccaagctgggagatgggattttgttcaaaaaattccctcacaaattcctgggcatatcggagagtcaacaagtatctcgtgggtcgcaagtccttctcagacatggattgtgaaagatccagaattaggatgagatgtcgaatgataccgcgctgtagtggtgtcgtatctttcaagagcctggatgaccgatacacttcagcaagaatatggggacacggcaaagggaagaaactgacctttttcgtttcccggcctccagaagcccttcaacggtcgagttgatggtaccatctgcaccctccaccagtgtctcccaggttctggatagctcccattctgcgcctccgcgctgctttcttttggctcgcggattatcgccccgagtcacctgtaaatcatcttcgtcttcggttacctcccccacatattcttcgtcggagtcggccatgttcgtaggtaagagtggagagagaaagagagaggatccaagcggaagaccgagaatggtccaagcttccgacggagctccgttggagaatatcctccctatctcctctttcaccgagtcgcaagtcgcaatctcttccaaaccaagcttttttggaatagctccgacgatagccgtagacggttaagctagaaaccccccgatgtggggaagaagatccattcgtgctggcgtagcagttcaagtcctccgtccagtcactgtccgccctacccctcctcttctttctcgcacactacacaaactttctctttcacattctcctcgactccggcctcgactgcctacacccgcggctatattagatctgaatttccctcccattaggcattgttccgccgaagtccgcatgatggcttctcaagagcgagagacacttcctgacgtgtgagtgatgccccccgcttgggctattatgtttctttttttgctgccttttcgtttgccacattcaagtcctccctttctttctggttcgcagcattggaaactgacatgacaatagagctaagcctatcaactaccatgtctcccttttcgacttgcagttcggtggttcatgggaatacaagggcgcattgaagatcgatcttaaagtcacccatgctaccagcgagattgtgctgaactcgaaggagatcgaagtacaaaatgctgagatattgggaaaagatggtacgtgtgggagaatataattagggtgatatagagaggacaaaacttatttcggtcttcttgtcatagggagccaattggccaaagtatccgggatcacctacgacaagcaatcagagcgagtttccctcgctttctcgcaagagattgcgccggcagacgttgtcctttccatcaactttacgggcactatgaacaacgccatggccggtttctaccgctcgaagtataagccggtgggggagccatctaccgacactcctaaggaggatgacttctactacatgctaagcactcaatttgagtcctgcgatgcacgaagggctttcccttgtttcgatgagccaaacttgaaatccaccttcgatttcgagatcgaagttcccaagggacagactgcactgagcaacatgccggttcaatccgaaagagacggaaacaagcctggtttgaagtttgtcacgttcgagaagacgccggttatgagcacctatcttctggcctgggcagttggtgacttcgaatacgtcgaggctatgaccgagcgcaaataccaaggcaagagtattcccgttcgagtctataccacgcggggccttcaggaccaggctcgctttgcactggaatgtgctcaccgcacgattgactatttctcggaagtctttgaaattgaataccccctccccaaagctgatctcctggcagttcacgaatttgtgagtaaccatttattccctatgtgttccaagcttttcatttgagctaaaatgcgagtctctaggccatgggtgccatggagaactggggtcttgtgacctatcgaacgaccgctgttctcttcgatgaagggacgtccgacaaccgctacaagaaccgcattgcttacgttgtagctcacggtcagtccccacatccattcgatctctgcatatgttgatgtcaagatggattcgttatctgactcattttatagagctggctcaccagtggtttggcaaccttgtcaccatggactggtggaatgagttgtggctgaatgagggattcgcaacctgggtcggttggcttgccgttgatcatttctatcctggtgagctttggtcgcttctggcagatgagcctctgacgcagtatctaatgtgcaagcagagtggaatgtctggtctcagtttgtcgtacggaattcccgaggtaatatccattatgctacgactgatattgacgttcttccaggctgaaggtgtgcaacaagcatttcatctcgactcgctccgcgcttcccaccctatcgaagttcccgttaggaacgccctcgaagtcgaccaaattttcgaccatatcagctacctgaagggaagctctgtcattcgcatgcttagtgttcatctcggcagggagactttcttgcgtggagttgcggactatctcaaatctcatgcatatggtagggcgtcaaagaagaagatttcaaggaacatctgctgagtggttataggaaatgcaaccacaaatgacctgtggtccgccctgagcaaagcctccggtcaggacgtgcattctttcatggtaagtaccccttagctctttgtttggctgtctgttggtcagcttgagatctgactgagctgccctagaatccctggattcgcaaaatcggattcccggttgtcaccgtgacagagcagcccggccagatcaccgttagccagaatcgattcttgtctaccggcgatgcgaagccagaggaggatgagacgaaatggtggattcctctcggcatcaaatccggagcagaactagctactgttgacacccgtgctctaaactcgaaatccgacaccatcagcggacttggggagggcactttttacaagatcaacaaggacttgtctgggttctaccgaacgaactacccccccgtgcatctggcaaagctgggccagtcgcttgatctgctgagcaccgaggacaagatcggtttgctgggtgatgcagctgcccttgcagtctctggcgagggcactacgcccgctttgttgactcttctggaaggattcaaggaggaacaaaattatctgtgagaaacttcgccttatggtcctttggtatcatttctaatctctcatcttgcagtgtttggtcccaaatctctgcatctctggggaacctccggtcggttttctcacaaaacgagaaagtggccaacggattgaagcaatttacccttcaactggcttccccagccgcagaacggattggctgggagttcaaacctgatgaggactatctcattgtccagcttcggaagctacttattgcaatggcctgtaatgcgggtcatgaagggtgagctatttttcatcgtgtccggatgttgttgaacgctctctaatacagtctcattatcttatagatttgtttcagaggccaagcgccgttttgatctctgggcgaccaaaaaagacatcagtgccatccatactaatctacggtcagtgattttcagcgtgaatgtgtccgtgggcggccgcaaggaatacgatgccgttaaggaagagtatatccagacagactctgtggatggcaaagagatttgcctgtccgcactgggacgcacaaaagatgctgctctggtgaaggactacttggacttcgtgttttcagataaggtggctgtccaagacatccacagcggtgctgtatctctggccgccaactcgaaggttcggcatttgctatggcagtacatcaaggacaactggactgttgtcgaaacacgattgtcatataacaatgttgtgtttgagcgctttgtccgtatgggtctatcaaagtttgccgaccaccagaccaatgatgacattgcggccttcttcaaggacaaggaaacgggggcctatgagcgtgcgctcgtgattgtctcggataacattcgaaccaatgcatcctataaggagcgtgaggaggcgttggttcttgaatggctgctggcacatggttacgcataaatgtgcatctacaaacatggtggctttatgattttcaacaataaatgtgttcaactggactctttctttgattttgatacagtgtcaaaggggattttagattcttcaggtcattggtccacgaggctgggtttatgcacgggatatcagttgagcaggtgatctccaggaaatggaaatcaaaataaaaaaactatccttgtgatagatatatcggtagaaggagaactaaaatcaagaagggacctctatagaagatatagaaaacaccgaaagaatagaaaatccgagaagtggtcgtgacgtgaaacaaagctgcgcatcaggtgcatctggctccctgcacctcctatcatttcaggcgactgttccatcattgtcccctcccccgacttcttaggaacttcgactccatcaactctttttttttccttcccttatattcctctggacttgtgtgtgctctatctctgcttttattccaccttcttatccacctcccagatctcatcatgaatcccgagtggtaagccttccccatctcatccatcccccaagttcccttctaactatgcgccctactttggtcgactatacaagtctgcctctgtgttgaatttgactgatgtgattttgatttctagagtattgttccgtcgttgatttgaccgtcacacgacccaaatcccctaacttgccgatctccgttgcctaatcatcgagatagatacgattaccttttcaagctgctcctcatcggtgattccggtgttggaaagtcttgcttgctgcttcgttttgccgatgatacctacaccgaaagctacatctcgacaatcggcgttgacttcgtacgtctcggaagctgcagggtatttggctgcaagagaatagtggtgctgacaggggattatagaaaatccgcacaatcgaactcgacggcaaaaccgtgaagcttcagatcgtacggctagattgaacaccgaacatttgaagcaaagctaataatgcatacagtgggataccgccggccaggagcgattccgtaccatcacatcttcttactaccggggcgctcatggtatttgcgtggtttacgatgtcaccgacatggattccttcaacaacgtgaagcagtggctccaggagattgaccggtacgctaccgagggtgttaacaagctgctcgttggaaacaagagcgatatggaggacaagaaggtcgtggaatacaccgttgccaaggtatgtttaaagacagacttcaaggccgttgggatagactagtaacatgtcttgattgcacttttacaggagttcgccgatagcctcggaattcctttcctcgaaacctcggccaagaacgcgtcgaatgttgagcaggcattcttgacaatggcacggcagatcaaggaacgcatgggaacggccactgtcaacaacaagccgactgtgcaggttggtcagggacagggtgtccagtctggatcagcaggtggctgctgctaaacggcacgatgttctctttgtgcggtgcggtgcttcaaattggcgcaatgttacatcatgaattgaggggtctcaagcggcgtggtatctaatcgacagaagtcaggcttgtcaggcctttggaaactcggcatgttcctgatgtgcaaggagacgattctccacagagctggcagtcgttatgatgatgccgctgggggttcttctctgccttgggttcgctttagactgcctgcgttctatcctcgttactgcgtttgctcgtgcgattaccgccggtttctgcgttctcatgatttcctggccacgtctctgctctattaccttggcccgtcattctctctgtgtctccccccttccccctttcctcttcacctttctattttctattttcgctttttttttctgtaggttggatttcccacttgtgaatggactaatagcgagaaccttgcgacttctcgaggcataatgcctcacatggggctactttttctattattttccggtaaaccagtgcattgtactgtgcaaaaccttatcgagttaaaatataacgttttagatacattgcgaaggcatgtatgaagatgtatgatcacatgcaagtcacaggcactgactctaaaataacctatgtacttgatttcctctgccacttcttggctttccatttccgtcttagtgctcagtccttgccgctttttgctcactgagtagaactgagcacgccccttagtattacataatcaccacgctcgctcactgagcatcacctgatcgttatataagctggatgactcgctcactgagcgtcacctgagcgctctgatttgctcactaagtagcctgatcttactcactgagcttgacctgagcgctctgactagctcactaagcacgacctgattattatataagctcaagactttgctcaccggagcgaagcgtagggagcagctaagtcagcagctcacctcaataaaatgcaccacgctagccccatccaaatgcagttgttcacaaggactcttgaccgttgtcccctcaacaaaaggctggcgtcatcaatttggcggtcgatcctggttatttcgcctccagctaagaggcaaattgatagtggggctacattcattggttttactattctgcggctatactactattcaactcgccgagtctcgcattctacaataccgtctctatatagttgcggaaaatatccagccctcaatttttggttctataatatctaggaatatctcagaaaaccccaattgagtggcttataaatctagtttagtgtttaattcttattttttaattcttttgtattttgcttgaataacactggtttatcgctcttgttgcctgcccgcttgctcctaggaataccacttcagctctagcgacctaggtatccgcaaaaatattctagactaatcgattatgtctactggggtgatctagctgcctataacgaaatttgagtccccttatttgtctaacgtactctaacgtatttaaactagcaatcagaaaataacttatcctagctgaagtccgagaggacttcctaggagctctagaccttttcgtgccaccgcaaacccaaactatcaaataccattggggccccagtgttgggtccgggtccgggtccgatatctcgacccaaccccgggttgtgcgacagactaaaccttcgtccgtttcctatcataattttacgatttgtataccattacttactaccgaggacggcagccaccttcaggagggggcacctatcaggctatggctggtcatatgacctgagccgtatattatcattagactagacattataatatcattatctttccaccagctataggctttcacgcaacagcaatagaggaaataatatcaaaagcaaaagccacaaccacgccgggtcgacagagacgatccgctccttggataagaataagagcccggatctagctagacaattgaaaacaagatgacataaagcaacgaacttctctcagcgcgaactgtctagccaaatgatcatgtgcaaagcagatgcaaatgcattcaagcctgcatagctgactcccacaacctgggaatctggtccgggaaccctctgtttggacctcagatctttgacggagatttggccttgcaagatatcggatcgctcccagagtgctggtacacgctcagaaacatttgaaatcgtcgccccggtccaatagtccaccgtagttcgccagtcttcgccggccaaatcaatcttaaccaacggacggaagtcaacatccttgaaaatcaaaatgaccccatctgggccagcatagtccaacgcatacttgagtgaggaagtagcgtataaaccgggtccgaactcgttctgaagcgtgtatgaagagacgaggggcgcgaagagtgaggctaggctgactattgacggacgtgataagcccttgtaaagaagattgccgccaagtgaattgatgaatgtattcatcaaatcaacgtaattttcatcacggttgttcttctttcccttcagttttgtcttaatgcaagaaatagttggcggaaaagattggaggcgcgcaaaggggaagacatcttgaatcctgttttgagtaggagttgttgtgagatttgggggaataaagctggcataagaaagcgcggaagcctggcgtcggacaggttcttcatagatcttgtccatgaatgttgctggtatcttcccttcttcaaacaaaattgaaacaatccaaagacgcggagaaccctgtgggatcgaacggtactcatctgtaagaacatatgcgggatcgcgaatgagctcttcgagctcttccaccccctcaagccaaaaaaggcttgacaacggtccgatgaacaaggagacctgctcgccatcctcatatagatactgtgatatctcttctggaatgacaccggggaattcaattcctgcagcccaaacaggttggtagtcggttgcgtacagatctagtatatctctctcgtctctcattgtgaaggtattttggtcacttcgagtttgagatggagttggtggcgaacggcaagagctcttcgaggtggagtcgttatcactggtcaatgacggtggggttttggaatgtgggacgcctggttcggtctcggctagcggcagtggtggtacagcaataggaagactgatactagacgcaactgtaccaggggaaaactcccgctttctctttgaacttcgagcttccattgtcaagtaacagaaaggtgaggttgtcaaggaaaaaaaaaaaccttggaagaacagaaatggaaagagttgttgtggtggacggaattacggttatgaaaggttaccagcgaaattttgctggattacatgtattataccagaacctgtcaggtgacctaatagtatactcccgataagcaaaaacatacacgtgacgtaattagcgtgttgcattttattgatggtgcttactcaggccgctcatgcctacgccccgcaaaaagggcgggttttggtcactgtattcgagcccgcagcttttgcgggctaggtagtagtctcgagtacagcgaccatcgaagccttttgggcagtagaaaagcatcgttactttcaacagaatgactaaatcggtctcctgggccaggtcgtttgggtatactctgaattagactaagtgctcattagaggactctgagcggtctctgagtaatcagcgagcatccaatcagactcactgagtgctcagtgagcgttcattggatctcactgttgagtcacgtgaatatatctgagcagctcactgagtcggagcgcggactgaaatctactcagtgagcctggctctgagcgccctcataaaagcggcggcagctaagataggaaaaccccacccggcagaggaaatcaagtacgtatagctacctacgtacttgatttcctctgccacttcttggcgttcccttaccgttttattgctcactgagtaaaaccgagcatgctcccgagcggtctgatccgcttaactaccgtgtagctacctaggtagtccggggatattcccaattccggtttattacctcggtagttagaacgtgacacactcaagtcacttgattagcatgcaggtaccgagttcgtcaataaataaatcaaatcaaatcaaacccatcaactaaataagcttgtgcaaggtgaatctgcgctatggggcgtctcggaatgcagtggagttggggaggagccgaggcacacagtacttcggcaaaacgtcatgaacatccatcccatccccggtggtcttaagttctaaacgttcttcacctcctgacacattccatcttcttctgctctttataggttctacgttacacctgaaaataggtcaataggccaagctcttcccatcatgtctcaaccaggagccgagcagagcaaggcagcatctgctgctgttcaacagagtgataacatcgcgcacgcgctggcgggtgcaggagggggtgttctgtcgatggtcttgacgtatgcttcccgcattttccccatcgctgctgctaaccccatatccattctagataccctctgatcactctgtcgacgcgagcccaagtcgagtcgaagcgtgcgcactcaaccacccttgatgccatacgccgcatcgtacagagggaaggtatatctggactatattccggcctggaatcagcgttgtttggaatcagcgtcaccaattttgtgtattactattggtatgaattcacgcgttcggcctttgagaaggccgccatcaagggaggccgagcttcgaaaaagctcacaacggtggagtctatgattgcgggggctattgcagggagtgccacggtgctgattaccaacccaatctgggtcatcaacactcgcatgactgcccgcaagtccgaggcggaggcaacattgcctggtgccaagaaaacgaaggcatccaccttcagcaccctcatagacctgctccggcaggagggccccaaggctctatttgcaggcgtcctcccggcgttgatcctggtgatcaacccaattctgcaatacactattttcgagcaactgaaaaatatagtggagcgccgccggcgtatgacgccgaaggatgcgttctacttgggcgcactgggaaaaatcttggccaccagcctcacctacccatacatcaccatcaagagccgagcgcatgtggccagcagggatggccccaaggagagcttgaacggaagcctgaagaggatcattcaggaagaaggctggaagggactttacaagggtaaacattctttggaagtcatactggatgttcactaacatatcctcaaaggtattggaccgaaggtcacccagagcgccatcactgctgcattcctttttgcattcaaggatgtgctgtatgatctgatggtgtctgcccgtagaagaggtcgcatcgctaaatagacaggaaatggctccaagcctaccggacctatgtgacaactcatacagccacacttcatggggagacaaggtccggaccctcactgtccactatgtatacttgttcgagtacgaggaattcgagcgggcggctttcacttcactttctcactataaagaatgacttggtgaaggttcttgaagttattggagctccaaggagcccttctaaagcgatacccaggtactcaaatatgtagtttagttatttatttgaaattcactcttatactcctttaattaaagaatccatttggacctgaccgccttatctttgattcaccgcccatcatcgcctatacccgcgttatcgcgttctcgacgcgattctgctcaatttctccacactttctcctgtatcttgtgcactctggttttcagttctggcattgattcatctgcccctctgcctctctgtgcctcaatatttctttgagcttctacacgtatctctcccaggtgtgcttctcccggtcgtttaggtggaaaactcctaatgctttgacagtccaagcttgcctctccatcgtcgcatcatcacattatctttgtgaccctcgtaccactagttagaactatctgcgctcgctacggatattgtctatcccacctattcgaaaccaatatcttgcgcgactgttttgcctaagctctaatagagctagctgtcaaggctataccggaacaattaatttcccaccaaagccatccaaagacataggcttctttcttttaaaggaaggaacagaaacacacccgaggaatcggctagttggaaggcaacaacggaaacctcgcgtttagtgtgaacaaagtgagagccggggccgatgttatgtctttctcactttgccatcgtccgacaccagacgtgagccagccaaaattcatatcaatcaagtcgttcatgtgagagctttcttctttcttttcacattcatacctgacgcttttcttccctttctagcctagaacatcagttgtgcttctaaaatgtctcacggcttttccagtcttaatggccagggtatagttcctgcattccctggtctgtcagcccgaagcatcccagaagatccagatatccaacgcgagactctgcgattgctagtgcagtattctagggtctcttctctaccggagaatccgtccactccggccacctctggtaatacgagagacgaggtcagagatgtctggcagagtccgcggactgaagtccaacctagtgagggctcacctcttcaaatatcacctcgactcatgggttcatcaagtggcagccatgccactcaaccttctccttcccactctatcgctccttcctctggcagtccaattcgggtttcccctcgcacttcttcgcgcgcttcttcccgcgcttcttcccgcgcttcctcccacgctccttccagggctccttcccgacttccatctccccagtctgtttctgtctctatcccttcctcacatggcatctctccaagtcaccgggagcgccaacggactcttagggaaagtgtggcaatctcaaatgccagtaggaacgatgagataactgcacccatgccaaagcagcatttctcttactcacagggtgtcatgtcatctgcctccagatcccctcactcccggtcaatatcgccaacctccgagcaaaattttattcgtcgttctagccgaaatagagccaaaccgattaattattacgccaatccttgggtcaatgttcccgttgaatctgaagagccagacattaatgtcgaagctattccggacacagtcgcgtcttctccacaggagccgcgtcgcgttttaccccgtcgtccaaatgtccaaaagctgctgtatagccgtgagcttggaggcggaaatcatcgccccattctcgccgatgtggtctcagatctgagaccatggaaatcatggcaaggcgcttcgggcgatctgcttgttctggcttggtcgcctgatggtactcagtttgcggcaggcgccgcagctaaatcagatgaacataatatgcagtacaacaagacgaacaatctccttttaggtgatcttcaaagcaatcgtctaagggaaattccagaccattggattccacgccccacaacttcgacagttgatgacccacggctgtttatgagtgtcaataatatgcagtggattggcaaccgactctacaccgctagttttgacaaaactgtcaagatttgggacgtggaatcaatctgcaacgtatcctgcactcataccttgcagcatgattcccgggtggcagtgatgtccgtctcgagattcgatccggatatattggctacagggactgaatcaattttggtctgggacacacgagatcccgaaaatatgacatcgactctccttcccatcgaccgcgatgcacggtataagcccaactttgagttctcatcgacggccctggcctgggggcatactccgtcgactaaggaattcttagccggaggtctggccgaaataggggaggatccagtatacaaaggtcacctagggttatggcgagctcgcgaatctgcgtttgagaccatcaagatggcttccaactcactaaatgtctttgacatcaaatggcactcttcgttgcccttttttgcaacggccagccctgaggatcctcacaacgcacgcatgaaaggtattggcattaccacgaaatcaatagtgagggtgtttagcctcaattgtgacctccaaaagcgcgtgccgtccgtgctggaattctcctgcccggccttagatatcaacgaggtcagtttctgtccaatgggttcaaacagcacatatgtcaccgctagttgcacggatggaaaaacctatgtttgggataatcggaggggcgatagaattcttcacgaacttcgccataactctccccttaacccgatggatcaccaacgaagccgggaaacggcagacgtgggcgtcagggtagctctgtggggttcgtctatggaccaattctacaccggtgcgtccgatggtgttctcaaacgatgggatattcgccggtcaccagaagatgtcctcgtcgaggatgtcgcatcttttgatgaggagatcatgtgcgcatctttcaccgatgatcaatctcaactcctcgtcggggggtctggagggggcgtgcacgtgctctcatcgggaccttattcggatcctaacataggaactttccagttcgaacatgccccagaacccgaagagcatagtgttagtggtatcgttgcgggaaatcagcttgtctcatccggccaggttgtaaagcacgaaacatttgggatgggtcaagggccctcttacacggggccttttgctatgtgggctaggaacgcaaaaaaaaacgtttctcttggtcgaattggggatcttcctttgctcaaaagatatcagagccaacaattggatggaccaccgcctgaagatcgtcacgaactcgatttgaatcagcgacaagaggtcgaaagacaaatacaaattgccgaaatacgaaatcgaggattccataagagaaaacgccaggagccttctatgatcgtctttcaaggccctatatatttgtcttcccttggctcttctcggccggggaagaagaggaagaaaaaagccgagagaatggatgtgaaaagggaaggaaatcaagagggaaatggagcagacaacagagaagataaagcgaaaaagaaatctcggacgaaaaagaaggctcgcaggttcgcgtctcggataattagcaacacagaatatgtcgaccttactctcctggattcagacacggagatggagacgtcaaaccgacatcggttcaacctcgaggaactacttgaggctcttgaagaagataactggttcccggctagtggggaaatcgatcctaacttccaaaaggagatcgtctaatgtggcagctttcttgatattgttgatgtgttttgcatagcattgaagcgtggagttcagatttggttgttttaaataaattcacgttgcagcgaacgggtttatcaatgatgtttgtgtatgtatgatcgataggctgcaatctcgaatgtggtagcctgtagatatacaatgatgttactatatatataactatagttaactatcagggtccatgccacgtgatccggatgacgcgtaatggatccaaaagcatacgaagacggaacaaggcacattttcttattatagaaaacaggaggttggaatagtagaaaataagaagaataatgcatggtagagattgctatgcaataggaataatcatacataggcgcatgcggatactttcgaggtacttcctcaacccttatcaacttcgtatccagtatatgggcgacggatcggaccactacgacaaaactaattttctgccgagcagaaaattagtcagctagccatacgctgttccacagctgtaatgagtatacaacaatttatattttctctaattactcactttccaacggtcgcattaagtttaaatttgaaggtctaattaattaaaatgcccctctctaaaagagttataaatttcaaactaattacaactattagaagctaataagtaagtatacctaagtaagtaagtatagagtaagcaagtaagtgtttcgggaggaaaatgtcttcctggaccgccttcctattaaatatactgccgactaggagtttcaaatcggtagaactagcagaattctaaaaggcggtaaattctagtatagggcattaagatagaggaatagaaccttatagcatcgataactaagcaattttataaatactaagactattttatacctagtagattattctaggtcatataacctccccgtataccaccatcttctcctccttacgcaaattgatattttccaaagtatacgtattctttatatagtacactctcctctcttaaatatggtactaccattatagagagaggtaatctactctttaaaaggtttaaggttaattgatagacgtatactagaggtaaatgtaaagaggttgcaatattacatacaggcctaagacaataatcatataggcggtgattagagcggtgagccaaaaattagttttgtcgtagtggtccgatccgtcgcccataccagtaatgtaagtggcgatacaaatcaaattgcatctctcgcgttgcaatttattatggggacatatctcaaacttatatttccccaacaattcctttgtctaccatatacctagtcatcatcactaggtacattcacatatcgcttggctccgccgaaaacgtgtgtgtttctatactcgacgctcattcgcccaaagagattcgtcatcgacaaaccggcgaaccaacccgccctttttcctccattaattagtgaagcggacacatatcctcaccggaaaccattgagcggaattgcctcaccgcagctgcttcctcgcccttctcgggtaagtgacaccaagtgcgggttcttgtcgggggggggggtcggcgaattgacgttctctgaaggtagtctagacgttccgggtcgcgcaaaatggctacaactacagtaaccggtcatgggcgacgcgcctccatacgccaggccgaattgcaaattccaaccaaatcctccgttccccagtcaacgagcagtccgatagacaaattcccgccgtacgaagacaccatcgacgccgtcgcggggtcaactcggccaacccgaagcgcctcggtgaaatataccccgagcgaggtctgggaaccccgaaaagcaaccttctactcacgagagtatgggaacggatcattgcgaaatcccaaacatcgcccacgaaagagcatcagcgaagccatcacgacgatcagaacacgcaatggcagtatgagtgccagtgctcatgaattggccgaagtacttcgcgccccagtctcttaccgactcattgtatgttgattcgcgtttcgagatgagaaatttgcaaaggaaaacctccttcaatcaggccgctcgctaacacactgtctctcaagggtctctgtgtcgtttggtatctgacctctgccctcacaaacacgtcctcgaaatcgatattgaacgctcttccgatgccgatcacattgacgatgattcaatttgcattcgtctccttctggtgtttgctattggtgtatctctccacagttatacctcggttgcgacaaagtatcccgatccttcaacatggaattcgctacccatcccgcgacgtgatttccacagcattgcccctggcagtatttcaattggccggccacattctgagctctatggctactgcacaaatccctgtatctctagtccacactatcaagggcctttcacctctctttacggttctagcataccggatcctgtttcgcattcgatacgcccgggcaacctatttatcgctgatccctctgactctgggtgtaatgcttgcatgctcgaccggagtgtctacaaatttcttcggtatcttctgcgcatttggtgcagctattgtgtttgtctcgcagaacatattctcaaagaagctattcaacgaggtagaccgtgcagaatcagatctacaaaccccggggcagcgaaagttggataaactcaacttgctttgttattgctccgggctggcttttttcctcactctgcctatttggtttgtcactgagggttacccactagtatctgatttcattcatgatggtgtgatatcgctatcgggtaagcaaggctcattggaccacggtgctcttttgatggagtttttgttcaacggagtctcacactttgcccaaaacatcctggcttttgtgttgctgtcaatggtatctcctgtgtcctattcggttgcatcattggtcaaacgtgtgtttgtgattgtggtagcggttctatggtttgggagctcgaccacctcgattcaagcatttggcattggcctcactttcgtgggcctctacctttacgatcgcaatagccatgatgatgtagctgatcaaagggcaaacacggatcatttccgtgccgaacagtccattcttccaatgaatgtgcggcacccaagcaagccatgggattccaatggttatgccttccccgcggggagggtttttgaaggtgctctcaactcccatgctgcactaaacaactccaagaaggaagacgatgggcctgggcatgttcgaccaagaggggccagtctttctcgtgcttggttaccaggcaccaaacaagaatccacttggcaggttagtgattctcaagctgcaacttagcatttgtattttattagttcggtgtacaatatcatggtagcgaggtgttgctcggaagagctttgacgtgactatcctcttcccttgctgtgtttatcctgcctaggatacgcagagtatataaatcatgatgtactttggctgcggcatagtcctaattacgaccggaaatctcaccagatgcgatataggaatatcatgagcaaatttagaataaatagaaggatggtatctgaaaatgtacagagtacaaaaattatatatcaggtgaatgtagctaccgttggtaaggaacaaagtcatcattaggcgaacctttgacagctccagctacggtgcaattctgctcttgggacatgctgtagaggaaataggaacagggaaattgcctgcctcctacaataaatgatgcccgttaacaatttaattggagaaaggaaagggagaaagggggtgaaacggtggcttataaggaaacccggagcggaagtttatccgcctaaccgagtcaatcgagccaatccccgcgagtccatttgccgttgtccttccaaggttagtcagcaaagtgatggtcagcacattatgtaactgcagattccgatgcaaagtgctctctgaacttccaaccgtacccaggctctcaccccctcgccctcctccaccttatctcccaccctcacatctctgttctccttctaatgatgcggccgcagctgtttcgtgcggccgcccggtccctccgggttcctaaggtcactccccgggcattcgcgacgacagcccctcgcgcggcccaggtggaactcaccattggtaagtccaatctttatctaatccatctaagttgatcgataactgatagcttgtttctctagatggcaaaaaggtgtcggtagaaggtaaatactgcctcgagataacttattgaaccttcactcacattctctcccaaaagctggctcggctcttatccaggcctgtgagcaggcaggcacaacggttcccaggtatgacaaaaccccaccagcccgatttgcttgcagtactaacatgcaccagatattgttaccacgagtatgtgcctctgatcgagtctcacacattgtttttgctaacaccagtcccttaagaaaacttttggttgcaggaaactgtatgtgaaattgacaataccccgtgccacgccattgaggcatgtgtacttacagaaactataggtcgtatgtgccttgtcgaagtcgagcgtgccccaaagccggtggcatcatgtgcttggccggtacaacccggtatggtggtgaagacgaattcaccactggttcacaaggcaagagagggtgtcatggagttccttctctccaaccatccgctcgattgtccggtctgcgaccaaggaggagagtgtgatctccaagaccagtcgatgcgttacggtgccgatcggggtcgattccatgaaaccggtggaaagcgtgccgtggaggataagaacatcggcccactggtcaagacctcaatgaatcggtgcattcattgcactcgttgtgtccgattcatgaatgacgtcgccggtgccccagaactaggaactgccggtcgcggaaacgacatgcagattggaacctacctcgagcagaacctcaattcagaactctcaggcaatatcattgacctttgccctgtcggtgcactaacttcgaagccctatgctttccgtgcacgtccatgggagctcaagcacaccgaatcgatcgacgtccttgatgcccttggctctaacatccggattgatagcagaggcctggaagtgatgcgggttgtcccgcgattgaatgacgatgttaacgaggaatggatcaacgacaagtcgcgattcgcatgcgatgggttgaagacccaacggctcacaacgccactcatccgtcgggagggcaaattcgttcctgccacctgggaacaggctctaacggagatctcatcggcccacaagaagttgcagccacaggccaatgagttcaaggctattgctggacacttggttgatactgagtcgctcgttgccatgaaggacctggcaaacaagcttggctctgacaaccttgccctggatcaacctggaggtggtgcccctattgctcacggtatcgatgtgcgctccaattacctgttcaattccaagatctatggaatcgaggaggcagatgcaatccttttggttgcgacaaaccctcgtcatgaagctgcagttctgaatgcccgtatccgcaagcagtatatcagatctgatctcgaggttggacttgtcggcgaggagtttgagagcacatttgacttcaaccatttgggcgctgatgtctcttccttgaaatccgctttgtccggagaatttggcaagaagcttgccggagccaaacggccaatgattatcgtcggtagcgctgctgcagaacaccctgatgctaaagcaatcttcgaggctgtcggtggtttcgttgagaagcatgcaagcaacttcattaccccggaatggcagggctacaatgtcctccagcgtgcggcgtctcgggccggtgcctatgaagttggcttcactacaccatcttcccaggttgctcagactacccccaagatggtctggcttttgggcgcagatgagatcgcccaaagcgagatcccgaaggatgcgtttgtcgtctaccagggacaccacggtgatcgcggtgctcaacttgctgatgttgttctcccgggcgctgcatacaccgagaagtcaggtacatacatcaacacagaaggtcgtgtgcaagttacccgtgctgccacttccctccccggtgcagctcgtgatgactggaagattatccgtgccactagcgaattcctcggcgctcctcttccttatgacgatattgaggctctccgcgaccgcatggaagagatcagccctgtcatgcgtcgctacgacgttgttgagccgacctcggttgtctcgttgagcaaggtccagcttgtggaccagaataagggatctcaagctactggggctcctttcaagaaggtgattgaagacttcttcttcactgacgctatctccagaaggtgagtaccctggttgttaatcgatttgcattgctaaccctgctttagttcgcccaccatggcccgcgcctccgctgccaaggccactggaaaccctgagaccaatttcatggccgcaggagaaatgtctcctcaggccttgtatggttagatcggggtctatcttgacctcattctgtgtttctctaatgtttgcaggcgtttttattgtaccacatcttaaatttccctcttgatgtactgtttcctttccatcctctgtgtttttccctatcatcttgaacacctctccggttcctgttgacctcttcgccattctccggtgtcgcctgggattaatcggtagtggttaccttgtacataaagactgaacccccaaaatttcgagtccatgggcgtcggagatgatgaatatgtgctacttccgtagttttatgcgtagcagctttgaaatgacagaagaagtgaaattatactaggagaaaatgactcggccaaaaaaaaaaggaatatccggacagggagcagaccagatccatgtatcaaggagtctcctgtgtcgattgggcgcttttctgcacttctgcatataagatggaactatatcttgatcttttgaactactttatctgacttgttccaagtggccagtttagagctcatcatcatccgtctctcccgcagtttcctcggcatcttcgctgggttgggctggagtagtcttaataggcccgccagtccttttagcaaatggcaaatctctttgaggcggcgcggtgtctcttgctggggaaactcgcttcagctgggcagattcatcctgagacgaatcgtcgtctgtcgtgctactgttctgttcgccgtccgaaggatgaggggtcgaatgctcttcgtccgtgtcttgattattgaaggcatctggattggtttttattggatcaatatccatttgttcgaacccatcagagtcgtctgtatcgctcatcttgcgagcacttctctttgctgaatgagatctctcggcggctctatctgactctctgggaatgctagcctgtacctcggagactgttgatacttagtcaagatatccaggtttctctgtttgtgccacctacctttggttgaatccacggtagccgatgccagaagacgttgctggttgcgaattttgagctttttctcgttcaagacctgcacaaaattggccaccagtcgattctcatgctcggtcttcgcatgcatgagctcctcgagctgttcattcaacctatgtatggtatcttcggcaagacgatagcggccggtcaggctggatacttgttgctctagcatctgagctctagccgctgtgattcctgcccattcaaaaagctcgacggcttgttcatcgtcttgcttgagggtaaaagcacccaggcgttgctatattagtgttaatatggctatatatagaatccatcgcgtagaacacgaactgtgatagtctggactcgcttccgtatcgtgatcacaatttccttgtcttcatcagagcctgatatactggccgaagcttcgagaccagtggcccaatccggctcatcaggggcagaacattgtcccagaatgagagagactgttttaacccattcatcatctgatccttggtaattctttgcttgaagatcattcaagcgtgattgtttcactgcgcgacatgagctcatgacttccagatttcattctatgacgacccacccaggctaacatagggtgattccccctcggtagccgtcaggctcagatcgagccgagcagggccggtacatgagacatggacgagtacaaaagacccagtctcgtcagacctgggaaaccgcaagactcgaggatccgttgagacaggagatagcatattgggtgtgttattgcctacggagtaaatgtatggtagtcgttagttaggtactgcaagtcatccaggcaacagagctcaagtggatatgaccaccgtacctatctccacatacggagtacttaaaattaccaatagcggttttttaaattggtcttatagatattacatactataaatacccccaaccggtaaatacatatggcttcaacgtgaatgttctgttaatcacgtggaattcttgttctcatacacgtaatgcactcttcgaagtatgcaggctccaccgaatctccggtaacctgattacctagatacattaccagtacggggcctgtcacgttcttcctctcctccacgaggaatctgaaggtccagccacaaccgacaacacctttctttccccctgtctcctcttcgcttttgcaattgagttcctttggtccagcggccagaatcaagtgtcttggggtgtccctaatgcttaactgtcctcttttaatgaatgtttatggatgaaggcctgccatttatcaggtcgcctagtgaacccgcttggtctcattcggcgaaatcggttctagagcaaggccggcctctattgggctgattattctaactgaactcacttgccactctgcgatcaacagagaagccgtgcttctcacttgcaacctatcttccattcctaccaaccgacgcggaatgacgctcatgttcgcaccccctgaaccctcaccagtgtcgcaaagcactgagtctgccacttaataacaactgcctccggacgcctgtaatcatcccatgaccttcgtgttctccgtacacctttaatcaattcgcttcgctgatcatggaatctttaccaatccacctacgaccgggtaccgacgagcccattgaatgctgggatgatgacgacgacctgcagttcagcgaggatattcaatttcgcaccgcatccagcgctggctccataacgaactcgtcatttcggccctctgggcaccgagattctatttcctctcgacgctctgctcgctcagatattgactctaatgcgggcgatgaagactggcaggtaccgctctacgacaacgatgaatttgcaaaagaagatgctattgcttcggccaagactgcgggcattcccattcctccagatatccccaagtcagctcttattgggggcacgatcaagcggttatcaactcgaaagaccaagcaaacttttgttgacgactggtcagaagacgtcgaggtcccaggtcctgaaaccctgttacatctcagaactcctcgggaaaccatatttcctgactctcttcgacatttgagctccgctgctactagtccagtgaaattcactgcctcgccatcttgggatgacgaattctcgacgcgtttgcaatctcccttgggaccatttgacaccttccaagacgacaatgatagcccagaagctcgtatcccaactctcaaagccccaactcctcgatctccgaagaaattgaacatcgacgatgtcggcagtggcttcggtgttgaacgggaagcagacgacgacttcaaccaggattttgaacttcccgccaatcatcaacctcttgaattatcccatcgaaaagataatttttacgtttccagtcccactttagaggactttgatcttgagtggtctgaagggagtatcggtgtacgagttggtggtaccgcaagggatggtcgttcagttcctagttcttctatctctatcgccagccccagcgtttcaagctgtctcaccgcagaaagtgaagacgatggcctggacggtatcgtcatccccgaaggtccccttgatttcaatgcttctctgcaaaagcgacaggctgcgcaagctgagaatatcgaagcggaagagagtcaggtgggccatgtttgttctgacgccgacgacttcttctctggccttgatatcgacaatgagaaggcattttcctttggaaaacctgctctgaatcccaacataaagtgcaaaacagaacggccatccagcccgactcctcgatctgcaacaacactcacgttcaccagtgcggcaggatctccacggactcgtattccacgcttgtctgggcatgatcggacccattcaacccaccttgagactgtgtccgaaagtggggcgcctctttccaaatttcgaacatcacaatcgcgtctagggcattcgtctcaatcgtcaacttcaagtctcccaacccctatcgttaatccatcgccagcccctacactctctgctcgatggcttcttgggtctcgcaatttccgggacgttgccccggcccctgagggtaacccatcagttaggcgtttaaagactaagcgatccctgccatcgattcgtggcttaagctcggccgcttcagtggccgcttcccagcgaccaccggtcgatcgtccagtccgccttccctcgaccagacctaaaacaccggtggatcaccccgcaactgatgcgaggtcgctgagtcgcaggccacaggtgccatttatgccggctggtgtatcggaatcccaatcacatcatgtcagtgtgaaggggtatcgctcgtcacgtcgcacaaattcagatagctccggcgggcttcttagtccgcagagcacagcttctcgactctcccggccaactcgcaatgagccgttccgtgctgggtttagcgacacaagcgcaaactctctcggttcctctacaaaacgtacaatcacacgacccactaaaagacgcaatttcggggacggaacagagttagagtcatttgatgacctatctacatcggtcttggcagagagcaggttcgtcaaaacccccactggtcgaggtgctccaaggttggtccgcgccagactcagccagagccggattgatctgccacgtgatgaatcacctactcaatctttaacgtccccaccaaactccaaactgcgcagtccgacccctaggtttgcgcgagatacaaatgcatctagaaatgcgagggaacaacgcattgcatccatggctattaattcgaaaggccgtgaaccaaatgctctttcgacgttcaactcaaactggaagtcccaacctgtctcaaggattcctccggcctctgcgacggttagaagccggaaaggtaaaccgaatgctagaccaacgtccaagccacacttgatcaagcccatgggatctggggtgcaggatgccaaatgtaagcaagacctctgatctctatttacacgatttgcgcaatcttattaaccgttttcagccgtgaggggtatgcgttacaatcctaccaatttccggtgggaagggaacgaaaatctagttcaggaatttgatgccgctgctcccaaatcacccaaacctgcaccggctctcatcgccaacgttggcgcgatgcagaatgtccagaccgttggtggtatggtcttcgatccacatcgtatgtgttggctcagggcgtctcttggagctggtgcagacgaagacgacgtgtttgctggtttggacgacttggatgacaaaattaccagcggcaccatcaatggacgaaattctggagccattgaggagcaattcccagcagttggggatgacgcaagtgccggtgaatcctctgatgaaggacctatgaccgaggaatttgatgtcggcccagaattcattcgacgacagcgggcggaggaagataagtggagacgcaaggttgacaaatgggttggattcgaccgaggcgatcacgaccatgaaaatcattgggaatggatcatccgcgatttagtggcttttgaccaccatcggggatcagcatagaagcacgccagatttgacgtctgcatatccacagagctttcccggacaggggtcgccttcttttacccgcatgtgtccatgtactaacccaaccccccaatacacgaacttacgacttgaagacccccatcgattggccgtgacgattcggccgatgtcatgaatttatggttttctcctttttcccgggcatatctgcccatatctgaccaaggtctgaccacgggggcagatatgctatgtaactatatcttttgttttgagtacatacagtttaatatctttttcttggagaggaggctattgtccttctgagcagtctatgcctatctgttgtatattattttgaacattcggactcgataccaacacagcgctctgttttctcaaaaacaaatatatataatcggaaagcagcagagtacatctgtcacaccagatatgttttggactgtctgcaagtctgcaggtctgcgagggtccgaaccttgaagcagtccgatgtgtctcaccttccaaccaaacgtatgtcatcctgttgtcccgccttggtacttctccgtacttctccgtgtacttttctttttccctttacatccacaaccctgcaaaagtcccttctccaagtggacttggtgaatggccacgtcaaatcgaagcctctttctcggatactcacttgcatctcttcccatttgggaattctcccccccaaaaaaaatcaaataaacaatacggtgggacaacatagcccagacacagtacaacattgacatgacagggattgccagcccatagaagacttcaaatctcgagggcccgattcatcacaattgccctagagcacttgtttgtacatcgatgtacacccattgacgatgacccccctcccgttttctctcttttcttccccgcgctctctccctgtcccctcttctcaccgaatgaacccaatggggaggagcttgagggtgcagaacttcctatagtggggattctcaatccatgttccttaccaatttgcacggctacttgcatggacagagataccttttgccgggggtatctcctgccgactttgtttgcgaagcaaacgtgcagaaacaaagagagtttcccccctttcctgattcgaatcgggaagatcctcctacgcgggagtagagttgttccgcaggtctaagtataggaaattcggggagatgatcttcgcccccccgctgtacttcggccaaatcaggagagccgaatgggtttccccccccccccccccaccnnnnnnnnnnnnnnnnnnnnnnnnnnnnnnnnnnnnnnnnnnnnnnnnnnnnnnnnnnnnnnnnnnnnnnnnnnnnnnnnnnnnnnnnnnnnnnnnnnnnnnnnnnnnnnnnnnnnnnnnnnnnnnnnnnnnnnnnnnnnnnnnnnataagggaggccgaaggggtttcccccccccccccaaagtcagcacaatctccgatagggtgcctcgaatagcctgtccactcccatatcctcaacgtggcttcttgaatggtggcgctgattgacctcagggcatcgaaaggcaggaatccgtatcaccattccttctgtgcgctgtcgtatcagcctgcttccacttttcgataccttcggcgggtcggacagaattgaccacgaaccccagtcctttctcactgcttttcttttcttttttcgttagatccatgccgctatcttccctgcaagctttgctaatatgcttccgtaccttacagagctctgttcgactcgcctggctccatcatttctttttctctgtggaatatttgctgttcgtcttccagggatgccctctgttgtctctgcccactatctctgtcgcgacatggtctcgtgcacttcatcttgggcatcagccatgtcagtcctgcactgtctgtccatcgaggtctttttaatagaattgctaccccgtttccagatgggctttctctgaattattcctctttctctctctctatatctcactttcgcaccgagatattatagacactgttcaattatttttgtgatacttgctgtggtgtaccagggtactgtgccaattcttcttcgactacatgcaaatgagttagccaggtcttcgtttcactatcattatcatcatcaccttcctcggagactcgctgtatactgcctttttttttctctctatattttttttaccccttcttattcttcttcttcttcctctatctgtttgaaggatcaacgtgagccgaacaagaatcaagtggcattccgactcagtgaggtatcgattatgagcagctttacaaggcgcaacgaagggaatgatgcctacctcatgaatcatcaaatggcaatgcctggctcgtacggtcagccagagagtcatgacttcaagcaagagagccatgacttcaacacgcatggatctggttcatatcatttccctcaacattctttcaacccatatgggtctcagtttggccagccctacggtccacagtcgagtctgtctccggggttgcagcatttgcagtatacgtcggaacattcgattccatcgatgacaaccccggatgacccccggctgcaccatccgccgcagttcatgtcccagtcgcgctaccttcaagggccgaggtacctgccccgcgacccgctgggtgaaaccgagattgaaagccaggagtctcataacgaggttacgttgctgtcagaggctgtagttcccgcacttagcggcttccctgatgtaaaggagtttgatcaattgatgcagaagtgggtgattcgtgatcaaccaggatggactcgatgctaatatctcattctagctatgttgaggacctgtccatcaagaagcaagataaagcgttgatctatgctaggagggcccgtaacatcagaactgtgttgattgaccccaaagatacggcggtggagtctgctcaatttcggtatgggtctctttggttcaatcaattacctgccttgctaaacaaatcaggttttgggtcaaaaagatgttcaagctccaagctgtgggatctgatgtaagtctcgcctgtcccggtacatatgatctcaatcgatgctgacgagtgatttgttgcgatgtaaagcataggaagatgatctgtcacgagggcaagccggttgcgattcgggaaaaattgttcaagatcctcaccaaggctcatcagcaatgccagcatggtggccgagacaagacatctgctcaggtccgacggatatattcatggtgggaaaatccgtgccgtactatatattatgtacataacatgtctgatgtacagccactgactatctcattagggttcccaaggaactgatctcccgcttcgtcaagatctgcccaacctgtcaggtgcgccgtgggggttctcgattgacgccgcctaattcgcgaagaagctcccccagactggagatggtctctcgatcccccaaacttccgtcgccgccaatctcgcgacgagaatcgacttttgccggtcaacttccccttgacaggacgcaagcagattattttggtcatttacatggtcatggtggctggctagatagtcatcaaaatgtgcaaagtcgctcgaatctaggtaacggagttcgctcgttccagggttccatgggcaatctttcgcactcaattgctggtaccttggattccttctccgccgacctatccattcctccgtcccaattgagttatacaacgggatatgtcccgcacggggctgcacctcagcgagagtattgattggcctttctggtcgacttgtgtggatgttgctttttgagtattatcagggtacactaagtgtgtgctctctaaaagtataccttgccaggagtctctagatatttttgtgcttccttgtgaacgacaagtctgatgagtggcacacacggacagggcaagaagttgattcccatccgctacggggttttgagtgacgccaatattgaatggagggaagggaggaagggatccggaaaaaaaaaggaagaacatgacaagagggaaaaaaaaacacaaaaatacgctgaataatcgaacgactgaattctgaattttgcattgtacaacagtagaccaacgaccgaaaattacagaagttttggcgagaggacctctttgatcgggatatacaacaatcagatatgcacatggtccgcgatcgtattcgatattcgaatgttcagtagccaattgcgggttaattggagcctcgtgtgaccatttctaaatgcatacagatttggcgacatgaaaacatcaattcatagctcccagcgtcggcgcttgaggggggttgcacgggttcaaggcactcggtgcttgtgagataggcgaccacggtgttccaggcaaatataggaccgagtggatcagattcgaaactccatctccgaacctttagaagatcatcaattcctcaactcattcaaacagtagacaggtttttaaacaggaagcgagaacttcttgcccttcaaaaccctgggagaaaaaagcgcataggtcagtgtccgcatcatacgtctgttttttttgtttctttgagcgaattgagcttacttgttgtagtaaatgtaaaagaaatcggagtaaagcaaagtttggatgattccggcgataatgctcacaggctggaaggaacgttggaaggaggcttcggtaaaatagcggaaaatccagttggggatgtagagtgccctatatagtcccagagcaaacagatagtgggtggtgatggtatccgcttccccggttcgttgcagcatgaataattgtggcaatatagcaaccgactccaaccaaatggaaaaagtccagagtatctacatgacgttagtcccgttctttctacaccgtagacagcatggaaccaacctcggagatgcgataatcgcgcggaaacagaatcgcgagcaccgcgctaattccgaggaggtattgaactttgaaagtatcgatattgggatcatgtgtgggtttgtagtcgttgagcatgaggtagatgacgtaggccgaggaaccgataaacagaagcttgaacgtagtgaggtacagggagtcggtgaacgtccagaaaagatctataaggcgcatgagtgattatgatcaacataaagctgacggtgacgtcgaaacctaccaagataccgagtgacaaaaacgagtaggtatagcacctgcgatttgaacgacaacccggaacaactctgcgacgcgccattagttgcaagtcatatgtggccttatagatagcaaaacatacgcttgacgtcttcatcttctgcagaagcatgaagatcgacgccaaatgggagaagtcggcttcaatcgttagtatatcgcgttggttttccattagttttcatgccatacctaataacctgaagatattcattgtgccgaagacggatctgagttaatagtgaatagtgacctaagccaggagagagagggagaaagaaaatagaggaaaggagagagggagacgagtctgagaattgggagactcgaccaaaatagctgagttgttgacacgaaggcaaaaaatggaaggggaacttcgaattacttgcagatcaggtacaatacgtgtatggtatgggtatgtattacacaggacagcgaggaaggcatggaggtacatggaggtacctcttggcaaggcctttcgaagcggcaaaataagtatatatttgtacctacagcgaggaggcggcatcttaagtatctacactatttccctacatatttatagagcgccgaaatgcataatgtcgtcaagtcgtcatattgatacaatcataatcgctacctagacctgcccaataccttgatagtaaaacgccgagatatattgacgttgtagggcaaacttacatttgcctcgctagaacaagtttccacccccaatgctctcatcggccattcgctggagatgaccttcagctagctcgctcttaagagcacatattgagctttcacgatcgagtcgatcccagtctcgaagttccgctcgcttggacctctgtgtctctgcgatctgctcaagtagtttttctttgtcgacatcaagctgagctaaccgcttctccacagcaggatctagaagcgacggaagactccgaccttccggcatgatagtacatagccccgcaagatggttgatccccctctgagccaatggttgagtcacacatggagtgccgggttgccgggaagttggatgtcggtaactgccacctagtaccggagatgagaaagaagcgcgaggacctgctggtggagcttgcgaaggtgcaacaggcccgcgacgtaccggcggtgaccccgtccaagcttcacgtgggccaggtccgcgacgaggacgagtcggcgcggatagtaaagagacatgcggaggaccacgatgttggttagatggcggcctaggtccctgataaggtcctgatggcgggagtggaagtgggcttgcactgtgatttttcggttgagtcgggatgttgccaccaaccctggtcccacttgtctgggattctctctctggaatcgaaaaaggcgaaggattgccaattggtgctcggtcctcatgatctgggcgttgctgtgtgtgaaaaggctccgtatcgtaggtctgatcccggtgcggagatcgaccttggggtttcgacgaccgttgcaagggtaccggggagcgaatcggcgaccgactacgagctttttcgggagccacaacaggcttttctatagccgacgatgaaagtcgagatatcagggcgggttgtgaggccaaggcttgtgcaggtgaaacatctcgtttcgccacatcacgagagtggcctcgatgcgatacatgaattgggctctgtggcaacaagccttctggctgtgctctcggagaggaagctcgggggggtttgtcaatattcaagacagcagaaccatctcgtctcgcggatcggaagacttggcttccaggggttgtatcgcgcattcgtctagggctgttgcgagcacgggatgcgttgcgtgatctgccatcactgtagggcgatttcgagcgccatttttggggcggtgatctgatcctgtcatctcttctgggcgagaatcttcttggtggagatcgtcgtctttcgtaggggggtgggccaaagtttctccccggaggagtacgtgagcgtcgccggtatggcggtggtgaccgactccgtacgcgcccgtaccctctatttgctgacggtacccaagtgtcggctcgtggtcgaggagggcttcggtttcgtggtggcgaacgccggtgacgaatttcatacccccgggaaggggaacgaccgtttctctcggcgggacgatagctttctccacctcttcgttcatcaaatctagggaaatacttagaaactttctttcaaaacgtttggatacgccaacgaaccttctgcgatcccagtccattctggcacggagaatatggatattagaggaggtgagatgaggttcaaagtattctgggttctccgtctcctggggagaagggtgaaagtagatagatagtataaggaattgaagggtcgaatcgcggtagatggaaggaccaagctaaaccccttttagaatcagttcccgtgactggggctcgatatatgtacatacataccaaaactacgcaagatgcttggaatactatttatataaatctacaaagtactccccttgaagtcgcatagattaatcaataagaataagaaatttcattcagaactaaccatacattaaaggctagaaactttccttgcaacctagagtatgaaccaaagcagccaaactccaatgctcatcatgaaaagaagcacacccgggaacccctaaagaaaaaaaatagaaaatcacagtaaaagaagcatccttaatgctttccccgtctctcctcttcctttcggaatcttttgcggtgctcctgtgcaatcatatcactcaagtcctcctggaaaccccagttcggtggattctgctgctgcctctgtgactcgtacatgctctggaggctctctttgctgagaccatcgccagattgaattgcatccaagttgacagacacttcaacatctccaggcttcttgcgtttccgactttggtcatctgcaccaagaacaggaggcttgcctgttgttccgctaaggtcatatgccctatcacccccgaaaaagccttccacgttcgtttgtttctcgggtatgacttgataagcactccgagggtgaatagattcctcggtatcggtaccacgatggtgtttgcgcacatcaaactctccggaaacattctcggcgccaacaaattcagatgggactgccgattcgattccactagcggtttccatgccactaggagaacgagcccctgcacccacgccaccttcgtcactttcttcttcttcgtgttcatcgtcgtcctcctcggcttcactctcctcctctgactcctctgattcgtgtaattctccccaaagctctttttcaaccggctctccttgttgggcatgttgttgaggctgtaaaacgccgaagatatcacctccgaatagggggcggttgtgttcatcgacaggtggctttccataacccccaggctgatagccccacgacgcgccgggtggaggcggcgcattgaggccggggatcttcagcgctgggtaggaagacgggggaccatgtcgctgctggttgacaagccacgggggagggcctcccggggtcataccaagagcgtcctttaactcatcgctcaattcaccaggtcggagatgcttgagattggtctcgtattctttgccctcataatagatttcaccgtaacgagtcagttctggcttggtttggaaacggaaaaatgcctcgtaaagcttctggtaatcgatgtccagcttgcccatctttggctgtactctttcccgttgcttctgcttcaaacttgactgctcctgcttctctaaagcggcgtcgcgcatttcagatattcccgtctcctgtatgaattttgggagagcgaacggtgccttctccactccccgtttggatgagagatactctcgtttgagcgaccagtgggagggtaccggaaccacattgcgatgggctttaatgtgaacgaggagtcgaggatcagaggcagatgtatctgtccattccacaatctcaggctttcgtaccattgctttgagttcagcaacggatagcttgttcatttccttccgcttctttttggagatcttgggctcgctatcttgctcttcgtcgggtatttcatcaccatcaaagaagacctcgggtttatcagcctccttcgatgaattgtcgttcactgtctcgtcgaattttccggcaacacctttgtacatttcccatagcggatcggttgggtcaggaagcaggtcagtgttggtatcagctggtgcatcttgagcagtagccactggcgaagatgacagttctcgtgcgatggtgttttcaatggaatttgtagtctttgtagcagtgttagcattgtatcggccacggctgagaggtttcgagggatatatatgtcttacctcggctttctgggcctttttcttggctcttctgagctggttcttgctcaatttcatggtcgctggaaggtttggcaaccgctcaattaacgcggtgccgagaattaacgcggtgccaagcggagaatattccggagagacgtggtactggcagcttggttcaagtgcgtgcaagggataaactcagctagcgaaagacaatggagtgggggacaaggttgaaaacaaaatagttatatggcatctcaattgccatcacgtgcattcacccgatgccttaccgcctatatctttctacactaggtacaaatctcacgtggtcggagaggttttgtcatttgttacgcaattcatgacctagttaactaactatactttattatatagttaatatatgtttagtccagctacttgtatagaatattcagtattgtgctaataacctagtagacactaaaaaaaggtaaaaaaaaaagataatattgtacaaaatggggggaacaagctctatcagcaaagatagcaaataagttcctaaacaatcctcacttaaagcaaaggatctacatagatttgcgaagctgtagttcactagcccagccacatcatagaaacataatccgattatagaatgtatgccagtattgatgtgaatggtgcaatgttgagcttagcagagccctggaagttaagcagacagtctacttcttcttctttgcggatcttgattctgttcgagtcttagattttgatcatgtcaagtaaccattaggtgtaggagcaaattacctgcagcagttcgcttcttcttcggccggcccttccctcgcaatttggcactatgaatcaaatgtttagtaggagtgtatgtgacatgggacaacaattcttacatctgaatagcttcttctctgtcatcttcggcttcgtcaaatgttgtcaatccaagaggcttataagtgttttgtaaatcttggaaagacacagtctgcttaggataccaggctgcaagcgctggtccacgcaaccgctgtctcaagatcttgtttccaagtcgaagccgttgcgggttgaaattaagagagaatatgcggcattgggtctagaggaattgtcagttagtgaatgtcggcacagcgcaatggaaaggtggatgaaccttaactagatccaagatccgacttgacgccattttgctttctcaaaggttcagaacaatcatatgcaagaagaagggtgaagcagctgttcacagcgacttggtagacaggtgtcattgaacttcggtagcaacagaaagtttgaccggtggtcatgtgacctcccgaagtataccgcctacatatcatccatgtttttacctccaggcgcaagaggaaaactagactaagactgaacaggggctacaacagtcgatatgtctcaagccaaagagatagaaaatccagcaatcttaaaaaggccagtggtagatcttaaaagatcatcatctgtctttgggtcagatggcacacaaaactcacaaaagcggcctaaggtgaataccatgttctcatcccactgagcgaattcctgttgattcgagtgaccttctaacatctacttgcataaaggttcaaccatcaagtcggccatcggatactaagtcctcctctattattgtcagtcacagcatgggcaagtccagcaaccattctcgtatacttcttctacaacgccttgttcgagaaatatcaaccgattctgatctcgctggtgttgactcggagattttggatgcaatttcgaggctggatgacacgtttcgtacgacgaagagtcaattgccttccaaagatccttccatagctggtgaggtcccaatatcacgccacccagatcacagtcccaagtcggtcaatggctcgtttggccttgagctcccccctatcatggatcacaagcttgaacttgctgtctttacccatccagctcttagcaacaataaaaacacgacctacgaccgactcgagatcctaggcgatgcatacattgagctgattgcaaccaaactcgtctgggagagatttccagatttaccagcaggtcggatatcacagattcgggagatgcttgttaagaatgagacactttcgggcttcgcagaaagctttggtttggaccgcagggttgctgtgccgccaaactacaacaccccatcaaagcgatggaccaaaacaaaaggcgacgtattcgaagcctacgtcgcggcaatcatactatccgatcctgtctctggctatgaagtagccgagcattggctagcaggtttatgggtgccaattctcaagaacttgggacatcagaaaggggagttacgctccaaggaggctcttgctaagaaaattatggggaaaagagtcaagcttgaatacatagaggagcgtccatcaattcagcagaagggcggtacacaaaatttcttcgtcgcgttatatctcactgggtggggatgggacaaaaggtttctgggttccggtcagggtttgagtaaagcagctgcaggtgacgaagcagcgaaaaagacgttgctgaacacgcctctgattcttgagatcatatcagcgaaagagtcatgggagtctaactcttaaaatcttggtcatatttcacgattgatcgggtcggtttcttcaagttactagatctcgcattccatttcttactcaataaaatagcacccgatgagtccacccttgcactgtgcagcttaaagacgttcctagaaccccattggcttcggcggagaatatgtaaatccgagattgattctccccaaggaatcaatccttctcacctctatccgtctcttgacctctaccagagacggctggggaagccgcgcaagccgaatgatatctatatcatagaatgacgagtatggaatttgtcttcgtcaacgttcagaagccaagtgacgcccttcagctcgccaaagcacccgaggtccgatctcacgtgacgcgttatcaatggaagcaatctgcgcgtcgagacaagcgaacccgaaggatcttgctaggtgttgcacaggatgtgaatggagctggatttcaaaacggcctccggctcgattcttttaaaccggaaccaccgtcgatattgcctcaaataggcggactccgagttgaccctttccagtcatatcctatctcgggtcaaccgtggactccgctgctggtcgatcactgtaagttactttttgaacttgatttaaacaaggtggactttgttaatatggtaagacttgatacacatggcagttgatattcccgagcttgacctacctggaaaccacggcctcttgaggaccacttggtttccattggtgatgaccgagcccgctttattctctgtcattcttcttcttgctgcatcgcattatgcctccctacaggtcgatcctagcagtatgaaaatcgatctcctcggttttcgttatacagctgtactatccatcaatcgcagtcttgatgctcggcagcccgagaatgtacatgacgctttgataggagccatagcaaagatggcaagctatgaggccatgttcggcagtctcgagaattataatatccacatgcagggtctcgcacgactcattagtttacgagggggtcttacttcactaggcttgaatggcttgctccagcggatggtgatttggatcgactgtaatgccgctttcttacatggatcggcaatgtatttccttatggatacctctgtgccgggtgaatctccgccatacccgaatcctggtcaattcctcgggagctcgtgatacccagcagagtctaaatcatttcattgaaccaatcaaaaccccgcatatccatcggtatgatgtcatgatctcatctatcatatatagttcatgcatttcctaaataggatatcacatctaaagcccgccccacatctcttggtggatatgccccacagatttccgatttcagataacacatactaatgcgggatctgggacatatgtactgtatactacatcataggtccagtcgctgaacatataaggaatgaacacctcacggggaaagatcaaatctctatcaatcggcattactcccccagctactccctatcttcaccacaaaaatggctctcactggtaaagtcgcccttatcaccggcggtgtcaagaatcttggagctgcaagtgcccttgaactagctagtgtcggcgccaatcttgctcttcactaccattcgtccagtggcgaaaaggatgcagctgcgctcaaagccacactccaggaaaagaacccttcgatcaaggtttccttctaccagggtgatctcacctctgcagctgcagtgacaaaattgtttgaagatgttattcgtgactttggccatgtcgatattgtggtcaacacagtcgggaaggtgctgaagaagcctatcacggaaatcagcgaggacgaatatgacacaatgttcgcgtaagtctttggagaagaacatcacgagctctctaggcatggttaacaagactttttttctagggtgaactccaaaactgcgttcttcgtcctaaaggaagccgctgctcatgtgaccgatggtggaaagatcatcagcattgtcactgcgctcctaggagcgtttactggctactatacttcttacgccggcagcaaagctcctgtcgagcactttactcggtattttgccagtctagtgtccattcaggtccttggctaacatctatcataggggtgtttgcaaggagcttcagtctcgcaggatcagtgtgaacaatgtcgccccgggaccaatggatacacgtgagtttactactacaaataatcaagggatacgtttcgttcaaacgatctaacgagatgttaccaacagctttcttctatccccaggaatctccagaagctgtggaattccacaaagcaaatggcatgggcaaccgtcttaccatggtagaggacattgctcctatcattcgcttcctctgtactgatggtgcgtggattaccggccagaccattttcgccaatggtggatatactactcgttgattgagtctttaaattctcatggcaaggctcctggtagatcgaattacaattgaatggggttggggagggggcacagccctattgtattttcttcccttccaagcttctctcgatcatataatgcaaagggagaatgtttgttgaatagaaagcctcattatttcttcactgatgataaattataatatgatattttaaaaatgttcctgtgtagtgaatacgcgcggggccgtatagtaacgaataagtggaggactgttttctatggtacgagtagtaggatactagactaaagagtaaaatgagtataattattaggccttgataggtgctgtagtacctggggaattttggtactattatccggtgctgcggcacctagtactacagtacggaggtccatcccaaaagttcttgtctcactcattttcacgctaatataaaactagtcctagtggcggagaggagatcatgtgaccgggtgctctctctactgggtcgaaaaaaatagaaatctagttggtaaaaaagtattcgctaagaaacggtagaaaagatccagccggtagaaaaaaactatctatcttaaccatataaaggacatgcctgggcgcatgtctcttccgcttggccaaaagaccattatgtcagcccttgcgctaatattattagaacctgtcaggaccctagtacaaagaaggctgatacctgaagtatttgtcaggaccccagtactgagaaggctgatacctgaagtatttgacagaaaaacggtagtaaggcgaatgtatatatggtagaaaaatctcaatcaattctctaattctctaaaaatgataatagtccggaaaacatgacaatctgatagacaacttagtaatcaaataaacaaaataaaatgaaaggatgttttttgggcagaaaaccttctaagttcgtttttctatagaaaaaccagcctggttagttatatgacctaactatattagggataaaaaataatagtatttatccnnnnnnnnnnnnnnnnnnnnnnnnnnnnnnnnnnnnnnnnnnnnnnnnnnnnnnnnnnnnnnnnnnnnnnnnnnnnnnnnnnnnnnnnnnnnnnnnnnnnnnnnnnnnnnnnnnnnnnnnnnnnnnnnnnnnnnnnnnnnnnnnnnnnnnnnnnnnnnnnnnnnnnnnnnnnnnnnnnnnnnnnnnnnnnnnnnnnnnnnnnnnnnnnnnnnnnnnnnnnnnnnnnnnnnnnnnnnnnnnnnnnnnnnnnnnnnnnnnnnnnnnnnnnnnnnnnnnnnnnnnnnnnnnnnnnnnnnnnnnnnnnnnnnnnnnnnnnnnnnnnnnnnnnnnnnnnnnnnnnnnnnnnnnnnnnnnnnnnnnnnnnnnnnnnnnnnnnnnnnnnnnnnnnnnnnnnnnnnnnnnnnnnnnnnnnnnnnnnnnnnnnnnnnnnnnnnnnnnnnnnnnnnnnnnnnnnnnnnnnnnnnnnnnnnnnnnnnnnnnnnnnnnnnnnnnnnnnnnnnnnnnnnnnnnnnnnnnnnnnnnnnnnnnnnnnnnnnnnnnnnnnnnnnnnnnnnnnnnnnnnnnnnnnnnnnnnnnnnnnnnnnnnnnnnnnnnnnnnnnnnnnnnnnnnnnnnnnnnnnnnnnnnnnnnnnnnnnnnnnnnnnnnnnnnnnnnnnnnnnnnnnnnnnnnnnnnnnnnnnnnnnnnnnnnnnnnnnnnnnnnnnnnnnnnnnnnnnnnnnnnnnnnnnnnnnnnnnnnnnnnnnnnnnnnnnnnnnnnnnnnnnnnnnnnnnnnnnnnnnnnnnnnnnnnnnnnnnnnnnnnnnnnnnnnnnnnnnnnnnnnnnnnnnnnnnnnnnnnnnnnnnnnnnnnnnnnnnnnnnnnnnnnnnnnnnnnnnnnnnnnnnnnnnnnnnnnnnnnnnnnnnnnnnnnnnnnnnnnnnnnnnnnnnnnnnnnnnnnnnnnnnnnnnnnnnnnnnnnnnnnnnnnnnnnnnnnnnnnnnnnnnnnnnnnnnnnnnnnnnnnnnnnnnnnnnnnnnnnnnnnnnnnnnnnnnnnnnnnnnnnnnnnnnnnnnnnnnnnnnnnnnnnnnnnnnnnnnnnnnnnnnnnnnnnnnnnnnnnnnnnnnnnnnnnnnnnnnnnnnnnnnnnnnnnnnnnnnnnnnnnnnnnnnnnnnnnnnnnnnnnnnnnnnnnnnnnnnnnnnnnnnnnnnnnnnnnnnnnnnnnnnnnnnnnnnnnnnnnnnnnnnnnnnnnnnnnnnnnnnnnnnnnnnnnnnnnnnnnnnnnnnnnnnnnnnnnnnnnnnnnnnnnnnnnnnnnnnnnnnnnnnnnnnnnnnnnnnnnnnnnnnnnnnnnnnnnnnnnnnnnnnnnnnnnnnnnnnnnnnnnnnnnnnnnnnnnnnnnnnnnnnnnnnnnnnnnnnnnnnnnnnnnnnnnnnnnnnnnnnnnnnnnnnnnnnnnnnnnnnnnnnnnnnnnnnnnnnnnnnnnnnnnnnnnnnnnnnnnnnnnnnnnnnnnnnnnnnnnnnnnnnnnnnnnnnnnnnnnnnnnnnnnnnnnnnnnnnnnnnnnnnnnnnnnnnnnnnnnnnnnnnnnnnnnnnnnnnnnnnnnnnnnnnnnnnnnnnnnnnnnnnnnnnnnnnnnnnnnnnnnnnnnnnnnnnnnnnnnnnnnnnnnnnnnnnnnnnnnnnnnnnnnnnnnnnnnnnnnnnnnnnnnnnnnnnnnnnnnnnnnnnnnnnnnnnnnnnnnnnnnnnnnnnnnnnnnnnnnnnnnnnnnnnnnnnnnnnnnnnnnnnnnnnnnnnnnnnnnnnnnnnnnnnnnnnnnnnnnnnnnnnnnnnnnnnnnnnnnnnnnnnnnnnnnnnnnnnnnnnnnnnnnnnnnnnnnnnnnnnnnnnnnnnnnnnnnnnnnnnnnnnnnnnnnnnnnnnnnnnnnnnnnnnnnnnnnnnnnnnnnnnnnnnnnnnnnnnnnnnnnnnnnnnnnnnnnnnnnnnnnnnnnnnnnnnnnnnnnnnnnnnnnnnnnnnnnnnnnnnnnnnnnnnnnnnnnnnnnnnnnnnnnnnnnnnnnnnnnnnnnnnnnnnnnnnnnnnnnnnnnnnnnnnnnnnnnnnnnnnnnnnnnnnnnnnnnnnnnnnnnnnnnnnnnnnnnnnnnnnnnnnnnnnnnnnnnnnnnnnnnnnnnnnnnnnnnnnnnnnnnnnnnnnnnnnnnnnnnnnnnnnnnnnnnnnnnnnnnnnnnnnnnnnnnnnnnnnnnnnnnnnnnnnnnnnnnnnnnnnnnnnnnnnnnnnnnnnnnnnnnnnnnnnnnnnnnnnnnnnnnnnnnnnnnnnnnnnnnnnnnnnnnnnnnnnnnnnnnnnnnnnnnnnnnnnnnnnnnnnnnnnnnnnnnnnnnnnnnnnnnnnnnnnnnnnnnnnnnnnnnnnnnnnnnnnnnnnnnnnnnnnnnnnnnnnnnnnnnnnnnnnnnnnnnnnnnnnnnnnnnnnnnnnnnnnnnnnnnnnnnnnnnnnnnnnnnnnnnnnnnnnnnnnnnnnnnnnnnnnnnnnnnnnnnnnnnnnnnnnnnnnnnnnnnnnnnnnnnnnnnnnnnnnnnnnnnnnnnnnnnnnnnnnnnnnnnnnnnnnnnnnnnnnnnnnnnnnnnnnnnnnnnnnnnnnnnnnnnnnnnnnnnnnnnnnnnnnnnnnnnnnnnnnnnnnnnnnnnnnnnnnnnnnnnnnnnnnnnnnnnnnnnnnnnnnnnnnnnnnnnnnnnnnnnnnnnnnnnnnnnnnnnnnnnnnnnnnnnnnnnnnnnnnnnnnnnnnnnnnnnnnnnnnnnnnnnnnnnnnnnnnnnnnnnnnnnnnnnnnnnnnnnnnnnnnnnnnnnnnnnnnnnnnnnnnnnnnnnnnnnnnnnnnnnnnnnnnnnnnnnnnnnnnnnnnnnnnnnnnnnnnnnnnnnnnnnnnnnnnnnnnnnnnnnnnnnnnnnnnnnnnnnnnnnnnnnnnnnnnnnnnnnnnnnnnnnnnnnnnnnnnnnnnnnnnnnnnnnnnnnnnnnnnnnnnnnnnnnnnnnnnnnnnnnnnnnnnnnnnnnnnnnnnnnnnnnnnnnnnnnnnnnnnnnnnnnnnnnnnnnnnnnnnnnnnnnnnnnnnnnnnnnnnnnnnnnnnnnnnnnnnnnnnnnnnnnnnnnnnnnnnnnnnnnnnnnnnnnnnnnnnnnnnnnnnnnnnnnnnnnnnnnnnnnnnnnnnnnnnnnnnnnnnnnnnnnnnnnnnnnnnnnnnnnnnnnnnnnnnnnnnnnnnnnnnnnnnnnnnnnnnnnnnnnnnnnnnnnnnnnnnnnnnnnnnnnnnnnnnnnnnnnnnnnnnnnnnnnnnnnnnnnnnnnnnnnnnnnnnnnnnnnnnnnnnnnnnnnnnnnnnnnnnnnnnnnnnnnnnnnnnnnnnnnnnnnnnnnnnnnnnnnnnnnnnnnnnnnnnnnnnnnnnnnnnnnnnnnnnnnnnnnnnnnnnnnnnnnnnnnnnnnnnnnnnnnnnnnnnnnnnnnnnnnnnnnnnnnnnnnnnnnnnnnnnnnnnnnnnnnnnnnnnnnnnnnnnnnnnnnnnnnnnnnnnnnnnnnnnnnnnnnnnnnnnnnnnnnnnnnnnnnnnnnnnnnnnnnnnnnnnnnnnnnnnnnnnnnnnnnnnnnnnnnnnnnnnnnnnnnnnnnnnnnnnnnnnnnnnnnnnnnnnnnnnnnnnnnnnnnnnnnnnnnnnnnnnnnnnnnnnnnnnnnnnnnnnnnnnnnnnnnnnnnnnnnnnnnnnnnnnnnnnnnnnnnnnnnnnnnnnnnnnnnnnnnnnnnnnnnnnnnnnnnnnnnnnnnnnnnnnnnnnnnnnnnnnnnnnnnnnnnnnnnnnnnnnnnnnnnnnnnnnnnnnnnnnnnnnnnnnnnnnnnnnnnnnnnnnnnnnnnnnnnnnnnnnnnnnnnnnnnnnnnnnnnnnnnnnnnnnnnnnnnnnnnnnnnnnnnnnnnnnnnnnnnnnnnnnnnnnnnnnnnnnnnnnnnnnnnnnnnnnnnnnnnnnnnnnnnnnnnnnnnnnnnnnnnnnnnnnnnnnnnnnnnnnnnnnnnnnnnnnnnnnnnnnnnnnnnnnnnnnnnnnnnnnnnnnnnnnnnnnnnnnnnnnnnnnnnnnnnnnnnnnnnnnnnnnnnnnnnnnnnnnnnnnnnnnnnnnnnnnnnnnnnnnnnnnnnnnnnnnnnnnnnnnnnnnnnnnnnnnnnnnnnnnnnnnnnnnnnnnnnnnnnnnnnnnnnnnnnnnnnnnnnnnnnnnnnnnnnnnnnnnnnnnnnnnnnnnnnnnnnnnnnnnnnnnnnnnnnnnnnnnnnnnnnnnnnnnnnnnnnnnnnnnnnnnnnnnnnnnnnnnnnnnnnnnnnnnnnnnnnnnnnnnnnnnnnnnnnnnnnnnnnnnnnnnnnnnnnnnnnnnnnnnnnnnnnnnnnnnnnnnnnnnnnnnnnnnnnnnnnnnnnnnnnnnnnnnnnnnnnnnnnnnnnnnnnnnnnnnnnnnnnnnnnnnnnnnnnnnnnnnnnnnnnnnnnnnnnnnnnnnnnnnnnnnnnnnnnnnnnnnnnnnnnnnnnnnnnnnnnnnnnnnnnnnnnnnnnnnnnnnnnnnnnnnnnnnnnnnnnnnnnnnnnnnnnnnnnnnnnnnnnnnnnnnnnnnnnnnnnnnnnnnnnnnnnnnnnnnnnnnnnnnnnnnnnnnnnnnnnnnnnnnnnnnnnnnnnnnnnnnnnnnnnnnnnnnnnnnnnnnnnnnnnnnnnnnnnnnnnnnnnnnnnnnnnnnnnnnnnnnnnnnnnnnnnnnnnnnnnnnnnnnnnnnnnnnnnnnnnnnnnnnnnnnnnnnnnnnnnnnnnnnnnnnnnnnnnnnnnnnnnnnnnnnnnnnnnnnnnnnnnnnnnnnnnnnnnnnnnnnnnnnnnnnnnnnnnnnnnnnnnnnnnnnnnnnnnnnnnnnnnnnnnnnnnnnnnnnnnnnnnnnnnnnnnnnnnnnnnnnnnnnnnnnnnnnnnnnnnnnnnnnnnnnnnnnnnnnnnnnnnnnnnnnnnnnnnnnnnnnnnnnnnnnnnnnnnnnnnnnnnnnnnnnnnnnnnnnnnnnnnnnnnnnnnnnnnnnnnnnnnnnnnnnnnnnnnnnnnnnnnnnnnnnnnnnnnnnnnnnnnnnnnnnnnnnnnnnnnnnnnnnnnnnnnnnnnnnnnnnnnnnnnnnnnnnnnnnnnnnnnnnnnnnnnnnnnnnnnnnnnnnnnnnnnnnnnnnnnnnnnnnnnnnnnnnnnnnnnnnnnnnnnnnnnnnnnnnnnnnnnnnnnnnnnnnnnnnnnnnnnnnnnnnnnnnnnnnnnnnnnnnnnnnnnnnnnnnnnnnnnnnnnnnnnnnnnnnnnnnnnnnnnnnnnnnnnnnnnnnnnnnnnnnnnnnnnnnnnnnnnnnnnnnnnnnnnnnnnnnnnnnnnnnnnnnnnnnnnnnnnnnnnnnnnnnnnnnnnnnnnnnnnnnnnnnnnnnnnnnnnnnnnnnnnnnnnnnnnnnnnnnnnnnnnnnnnnnnnnnnnnnnnnnnnnnnnnnnnnnnnnnnnnnnnnnnnnnnnnnnnnnnnnnnnnnnnnnnnnnnnnnnnnnnnnnnnnnnnnnnnnnnnnnnnnnnnnnnnnnnnnnnnnnnnnnnnnnnnnnnnnnnnnnnnnnnnnnnnnnnnnnnnnnnnnnnnnnnnnnnnnnnnnnnnnnnnnnnnnnnnnnnnnnnnnnnnnnnnnnnnnnnnnnnnnnnnnnnnnnnnnnnnnnnnnnnnnnnnnnnnnnnnnnnnnnnnnnnnnnnnnnnnnnnnnnnnnnnnnnnnnnnnnnnnnnnnnnnnnnnnnnnnnnnnnnnnnnnnnnnnnnnnnnnnnnnnnnnnnnnnnnnnnnnnnnnnnnnnnnnnnnnnnnnnnnnnnnnnnnnnnnnnnnnnnnnnnnnnnnnnnnnnnnnnnnnnnnnnnnnnnnnnnnnnnnnnnnnnnnnnnnnnnnnnnnnnnnnnnnnnnnnnnnnnnnnnnnnnnnnnnnnnnnnnnnnnnnnnnnnnnnnnnnnnnnnnnnnnnnnnnnnnnnnnnnnnnnnnnnnnnnnnnnnnnnnnnnnnnnnnnnnnnnnnnnnnnnnnnnnnnnnnnnnnnnnnnnnnnnnnnnnnnnnnnnnnnnnnnnnnnnnnnnnnnnnnnnnnnnnnnnnnnnnnnnnnnnnnnnnnnnnnnnnnnnnnnnnnnnnnnnnnnnnnnnnnnnnnnnnnnnnnnnnnnnnnnnnnnnnnnnnnnnnnnnnnnnnnnnnnnnnnnnnnnnnnnnnnnnnnnnnnnnnnnnnnnnnnnnnnnnnnnnnnnnnnnnnnnnnnnnnnnnnnnnnnnnnnnnnnnnnnnnnnnnnnnnnnnnnnnnnnnnnnnnnnnnnnnnnnnnnnnnnnnnnnnnnnnnnnnnnnnnnnnnnnnnnnnnnnnnnnnnnnnnnnnnnnnnnnnnnnnnnnnnnnnnnnnnnnnnnnnnnnnnnnnnnnnnnnnnnnnnnnnnnnnnnnnnnnnnnnnnnnnnnnnnnnnnnnnnnnnnnnnnnnnnnnnnnnnnnnnnnnnnnnnnnnnnnnnnnnnnnnnnnnnnnnnnnnnnnnnnnnnnnnnnnnnnnnnnnnnnnnnnnnnnnnnnnnnnnnnnnnnnnnnnnnnnnnnnnnnnnnnnnnnnnnnnnnnnnnnnnnnnnnnnnnnnnnnnnnnnnnnnnnnnnnnnnnnnnnnnnnnnnnnnnnnnnnnnnnnnnnnnnnnnnnnnnnnnnnnnnnnnnnnnnnnnnnnnnnnnnnnnnnnnnnnnnnnnnnnnnnnnnnnnnnnnnnnnnnnnnnnnnnnnnnnnnnnnnnnnnnnnnnnnnnnnnnnnnnnnnnnnnnnnnnnnnnnnnnnnnnnnnnnnnnnnnnnnnnnnnnnnnnnnnnnnnnnnnnnnnnnnnnnnnnnnnnnnnnnnnnnnnnnnnnnnnnnnnnnnnnnnnnnnnnnnnnnnnnnnnnnnnnnnnnnnnnnnnnnnnnnnnnnnnnnnnnnnnnnnnnnnnnnnnnnnnnnnnnnnnnnnnnnnnnnnnnnnnnnnnnnnnnnnnnnnnnnnnnnnnnnnnnnnnnnnnnnnnnnnnnnnnnnnnnnnnnnnnnnnnnnnnnnnnnnnnnnnnnnnnnnnnnnnnnnnnnnnnnnnnnnnnnnnnnnnnnnnnnnnnnnnnnnnnnnnnnnnnnnnnnnnnnnnnnnnnnnnnnnnnnnnnnnnnnnnnnnnnnnnnnnnnnnnnnnnnnnnnnnnnnnnnnnnnnnnnnnnnnnnnnnnnnnnnnnnnnnnnnnnnnnnnnnnnnnnnnnnnnnnnnnnnnnnnnnnnnnnnnnnnnnnnnnnnnnnnnnnnnnnnnnnnnnnnnnnnnnnnnnnnnnnnnnnnnnnnnnnnnnnnnnnnnnnnnnnnnnnnnnnnnnnnnnnnnnnnnnnnnnnnnnnnnnnnnnnnnnnnnnnnnnnnnnnnnnnnnnnnnnnnnnnnnnnnnnnnnnnnnnnnnnnnnnnnnnnnnnnnnnnnnnnnnnnnnnnnnnnnnnnnnnnnnnnnnnnnnnnnnnnnnnnnnnnnnnnnnnnnnnnnnnnnnnnnnnnnnnnnnnnnnnnnnnnnnnnnnnnnnnnnnnnnnnnnnnnnnnnnnnnnnnnnnnnnnnnnnnnnnnnnnnnnnnnnnnnnnnnnnnnnnnnnnnnnnnnnnnnnnnnnnnnnnnnnnnnnnnnnnnnnnnnnnnnnnnnnnnnnnnnnnnnnnnnnnnnnnnnnnnnnnnnnnnnnnnnnnnnnnnnnnnnnnnnnnnnnnnnnnnnnnnnnnnnnnnnnnnnnnnnnnnnnnnnnnnnnnnnnnnnnnnnnnnnnnnnnnnnnnnnnnnnnnnnnnnnnnnnnnnnnnnnnnnnnnnnnnnnnnnnnnnnnnnnnnnnnnnnnnnnnnnnnnnnnnnnnnnnnnnnnnnnnnnnnnnnnnnnnnnnnnnnnnnnnnnnnnnnnnnnnnnnnnnnnnnnnnnnnnnnnnnnnnnnnnnnnnnnnnnnnnnnnnnnnnnnnnnnnnnnnnnnnnnnnnnnnnnnnnnnnnnnnnnnnnnnnnnnnnnnnnnnnnnnnnnnnnnnnnnnnnnnnnnnnnnnnnnnnnnnnnnnnnnnnnnnnnnnnnnnnnnnnnnnnnnnnnnnnnnnnnnnnnnnnnnnnnnnnnnnnnnnnnnnnnnnnnnnnnnnnnnnnnnnnnnnnnnnnnnnnnnnnnnnnnnnnnnnnnnnnnnnnnnnnnnnnnnnnnnnnnnnnnnnnnnnnnnnnnnnnnnnnnnnnnnnnnnnnnnnnnnnnnnnnnnnnnnnnnnnnnnnnnnnnnnnnnnnnnnnnnnnnnnnnnnnnnnnnnnnnnnnnnnnnnnnnnnnnnnnnnnnnnnnnnnnnnnnnnnnnnnnnnnnnnnnnnnnnnnnnnnnnnnnnnnnnnnnnnnnnnnnnnnnnnnnnnnnnnnnnnnnnnnnnnnnnnnnnnnnnnnnnnnnnnnnnnnnnnnnnnnnnnnnnnnnnnnnnnnnnnnnnnnnnnnnnnnnnnnnnnnnnnnnnnnnnnnnnnnnnnnnnnnnnnnnnnnnnnnnnnnnnnnnnnnnnnnnnnnnnnnnnnnnnnnnnnnnnnnnnnnnnnnnnnnnnnnnnnnnnnnnnnnnnnnnnnnnnnnnnnnnnnnnnnnnnnnnnnnnnnnnnnnnnnnnnnnnnnnnnnnnnnnnnnnnnnnnnnnnnnnnnnnnnnnnnnnnnnnnnnnnnnnnnnnnnnnnnnnnnnnnnnnnnnnnnnnnnnnnnnnnnnnnnnnnnnnnnnnnnnnnnnnnnnnnnnnnnnnnnnnnnnnnnnnnnnnnnnnnnnnnnnnnnnnnnnnnnnnnnnnnnnnnnnnnnnnnnnnnnnnnnnnnnnnnnnnnnnnnnnnnnnnnnnnnnnnnnnnnnnnnnnnnnnnnnnnnnnnnnnnnnnnnnnnnnnnnnnnnnnnnnnnnnnnnnnnnnnnnnnnnnnnnnnnnnnnnnnnnnnnnnnnnnnnnnnnnnnnnnnnnnnnnnnnnnnnnnnnnnnnnnnnnnnnnnnnnnnnnnnnnnnnnnnnnnnnnnnnnnnnnnnnnnnnnnnnnnnnnnnnnnnnnnnnnnnnnnnnnnnnnnnnnnnnnnnnnnnnnnnnnnnnnnnnnnnnnnnnnnnnnnnnnnnnnnnnnnnnnnnnnnnnnnnnnnnnnnnnnnnnnnnnnnnnnnnnnnnnnnnnnnnnnnnnnnnnnnnnnnnnnnnnnnnnnnnnnnnnnnnnnnnnnnnnnnnnnnnnnnnnnnnnnnnnnnnnnnnnnnnnnnnnnnnnnnnnnnnnnnnnnnnnnnnnnnnnnnnnnnnnnnnnnnnnnnnnnnnnnnnnnnnnnnnnnnnnnnnnnnnnnnnnnnnnnnnnnnnnnnnnnnnnnnnnnnnnnnnnnnnnnnnnnnnnnnnnnnnnnnnnnnnnnnnnnnnnnnnnnnnnnnnnnnnnnnnnnnnnnnnnnnnnnnnnnnnnnnnnnnnnnnnnnnnnnnnnnnnnnnnnnnnnnnnnnnnnnnnnnnnnnnnnnnnnnnnnnnnnnnnnnnnnnnnnnnnnnnnnnnnnnnnnnnnnnnnnnnnnnnnnnnnnnnnnnnnnnnnnnnnnnnnnnnnnnnnnnnnnnnnnnnnnnnnnnnnnnnnnnnnnnnnnnnnnnnnnnnnnnnnnnnnnnnnnnnnnnnnnnnnnnnnnnnnnnnnnnnnnnnnnnnnnnnnnnnnnnnnnnnnnnnnnnnnnnnnnnnnnnnnnnnnnnnnnnnnnnnnnnnnnnnnnnnnnnnnnnnnnnnnnnnnnnnnnnnnnnnnnnnnnnnnnnnnnnnnnnnnnnnnnnnnnnnnnnnnnnnnnnnnnnnnnnnnnnnnnnnnnnnnnnnnnnnnnnnnnnnnnnnnnnnnnnnnnnnnnnnnnnnnnnnnnnnnnnnnnnnnnnnnnnnnnnnnnnnnnnnnnnnnnnnnnnnnnnnnnnnnnnnnnnnnnnnnnnnnnnnnnnnnnnnnnnnnnnnnnnnnnnnnnnnnnnnnnnnnnnnnnnnnnnnnnnnnnnnnnnnnnnnnnnnnnnnnnnnnnnnnnnnnnnnnnnnnnnnnnnnnnnnnnnnnnnnnnnnnnnnnnnnnnnnnnnnnnnnnnnnnnnnnnnnnnnnnnnnnnnnnnnnnnnnnnnnnnnnnnnnnnnnnnnnnnnnnnnnnnnnnnnnnnnnnnnnnnnnnnnnnnnnnnnnnnnnnnnnnnnnnnnnnnnnnnnnnnnnnnnnnnnnnnnnnnnnnnnnnnnnnnnnnnnnnnnnnnnnnnnnnnnnnnnnnnnnnnnnnnnnnnnnnnnnnnnnnnnnnnnnnnnnnnnnnnnnnnnnnnnnnnnnnnnnnnnnnnnnnnnnnnnnnnnnnnnnnnnnnnnnnnnnnnnnnnnnnnnnnnnnnnnnnnnnnnnnnnnnnnnnnnnnnnnnnnnnnnnnnnnnnnnnnnnnnnnnnnnnnnnnnnnnnnnnnnnnnnnnnnnnnnnnnnnnnnnnnnnnnnnnnnnnnnnnnnnnnnnnnnnnnnnnnnnnnnnnnnnnnnnnnnnnnnnnnnnnnnnnnnnnnnnnnnnnnnnnnnnnnnnnnnnnnnnnnnnnnnnnnnnnnnnnnnnnnnnnnnnnnnnnnnnnnnnnnnnnnnnnnnnnnnnnnnnnnnnnnnnnnnnnnnnnnnnnnnnnnnnnnnnnnnnnnnnnnnnnnnnnnnnnnnnnnnnnnnnnnnnnnnnnnnnnnnnnnnnnnnnnnnnnnnnnnnnnnnnnnnnnnnnnnnnnnnnnnnnnnnnnnnnnnnnnnnnnnnnnnnnnnnnnnnnnnnnnnnnnnnnnnnnnnnnnnnnnnnnnnnnnnnnnnnnnnnnnnnnnnnnnnnnnnnnnnnnnnnnnnnnnnnnnnnnnnnnnnnnnnnnnnnnnnnnnnnnnnnnnnnnnnnnnnnnnnnnnnnnnnnnnnnnnnnnnnnnnnnnnnnnnnnnnnnnnnnnnnnnnnnnnnnnnnnnnnnnnnnnnnnnnnnnnnnnnnnnnnnnnnnnnnnnnnnnnnnnnnnnnnnnnnnnnnnnnnnnnnnnnnnnnnnnnnnnnnnnnnnnnnnnnnnnnnnnnnnnnnnnnnnnnnnnnnnnnnnnnnnnnnnnnnnnnnnnnnnnnnnnnnnnnnnnnnnnnnnnnnnnnnnnnnnnnnnnnnnnnnnnnnnnnnnnnnnnnnnnnnnnnnnnnnnnnnnnnnnnnnnnnnnnnnnnnnnnnnnnnnnnnnnnnnnnnnnnnnnnnnnnnnnnnnnnnnnnnnnnnnnnnnnnnnnnnnnnnnnnnnnnnnnnnnnnnnnnnnnnnnnnnnnnnnnnnnnnnnnnnnnnnnnnnnnnnnnnnnnnnnnnnnnnnnnnnnnnnnnnnnnnnnnnnnnnnnnnnnnnnnnnnnnnnnnnnnnnnnnnnnnnnnnnnnnnnnnnnnnnnnnnnnnnnnnnnnnnnnnnnnnnnnnnnnnnnnnnnnnnnnnnnnnnnnnnnnnnnnnnnnnnnnnnnnnnnnnnnnnnnnnnnnnnnnnnnnnnnnnnnnnnnnnnnnnnnnnnnnnnnnnnnnnnnnnnnnnnnnnnnnnnnnnnnnnnnnnnnnnnnnnnnnnnnnnnnnnnnnnnnnnnnnnnnnnnnnnnnnnnnnnnnnnnnnnnnnnnnnnnnnnnnnnnnnnnnnnnnnnnnnnnnnnnnnnnnnnnnnnnnnnnnnnnnnnnnnnnnnnnnnnnnnnnnnnnnnnnnnnnnnnnnnnnnnnnnnnnnnnnnnnnnnnnnnnnnnnnnnnnnnnnnnnnnnnnnnnnnnnnnnnnnnnnnnnnnnnnnnnnnnnnnnnnnnnnnnnnnnnnnnnnnnnnnnnnnnnnnnnnnnnnnnnnnnnnnnnnnnnnnnnnnnnnnnnnnnnnnnnnnnnnnnnnnnnnnnnnnnnnnnnnnnnnnnnnnnnnnnnnnnnnnnnnnnnnnnnnnnnnnnnnnnnnnnnnnnnnnnnnnnnnnnnnnnnnnnnnnnnnnnnnnnnnnnnnnnnnnnnnnnnnnnnnnnnnnnnnnnnnnnnnnnnnnnnnnnnnnnnnnnnnnnnnnnnnnnnnnnnnnnnnnnnnnnnnnnnnnnnnnnnnnnnnnnnnnnnnnnnnnnnnnnnnnnnnnnnnnnnnnnnnnnnnnnnnnnnnnnnnnnnnnnnnnnnnnnnnnnnnnnnnnnnnnnnnnnnnnnnnnnnnnnnnnnnnnnnnnnnnnnnnnnnnnnnnnnnnnnnnnnnnnnnnnnnnnnnnnnnnnnnnnnnnnnnnnnnnnnnnnnnnnnnnnnnnnnnnnnnnnnnnnnnnnnnnnnnnnnnnnnnnnnnnnnnnnnnnnnnnnnnnnnnnnnnnnnnnnnnnnnnnnnnnnnnnnnnnnnnnnnnnnnnnnnnnnnnnnnnnnnnnnnnnnnnnnnnnnnnnnnnnnnnnnnnnnnnnnnnnnnnnnnnnnnnnnnnnnnnnnnnnnnnnnnnnnnnnnnnnnnnnnnnnnnnnnnnnnnnnnnnnnnnnnnnnnnnnnnnnnnnnnnnnnnnnnnnnnnnnnnnnnnnnnnnnnnnnnnnnnnnnnnnnnnnnnnnnnnnnnnnnnnnnnnnnnnnnnnnnnnnnnnnnnnnnnnnnnnnnnnnnnnnnnnnnnnnnnnnnnnnnnnnnnnnnnnnnnnnnnnnnnnnnnnnnnnnnnnnnnnnnnnnnnnnnnnnnnnnnnnnnnnnnnnnnnnnnnnnnnnnnnnnnnnnnnnnnnnnnnnnnnnnnnnnnnnnnnnnnnnnnnnnnnnnnnnnnnnnnnnnnnnnnnnnnnnnnnnnnnnnnnnnnnnnnnnnnnnnnnnnnnnnnnnnnnnnnnnnnnnnnnnnnnnnnnnnnnnnnnnnnnnnnnnnnnnnnnnnnnnnnnnnnnnnnnnnnnnnnnnnnnnnnnnnnnnnnnnnnnnnnnnnnnnnnnnnnnnnnnnnnnnnnnnnnnnnnnnnnnnnnnnnnnnnnnnnnnnnnnnnnnnnnnnnnnnnnnnnnnnnnnnnnnnnnnnnnnnnnnnnnnnnnnnnnnnnnnnnnnnnnnnnnnnnnnnnnnnnnnnnnnnnnnnnnnnnnnnnnnnnnnnnnnnnnnnnnnnnnnnnnnnnnnnnnnnnnnnnnnnnnnnnnnnnnnnnnnnnnnnnnnnnnnnnnnnnnnnnnnnnnnnnnnnnnnnnnnnnnnnnnnnnnnnnnnnnnnnnnnnnnnnnnnnnnnnnnnnnnnnnnnnnnnnnnnnnnnnnnnnnnnnnnnnnnnnnnnnnnnnnnnnnnnnnnnnnnnnnnnnnnnnnnnnnnnnnnnnnnnnnnnnnnnnnnnnnnnnnnnnnnnnnnnnnnnnnnnnnnnnnnnnnnnnnnnnnnnnnnnnnnnnnnnnnnnnnnnnnnnnnnnnnnnnnnnnnnnnnnnnnnnnnnnnnnnnnnnnnnnnnnnnnnnnnnnnnnnnnnnnnnnnnnnnnnnnnnnnnnnnnnnnnnnnnnnnnnnnnnnnnnnnnnnnnnnnnnnnnnnnnnnnnnnnnnnnnnnnnnnnnnnnnnnnnnnnnnnnnnnnnnnnnnnnnnnnnnnnnnnnnnnnnnnnnnnnnnnnnnnnnnnnnnnnnnnnnnnnnnnnnnnnnnnnnnnnnnnnnnnnnnnnnnnnnnnnnnnnnnnnnnnnnnnnnnnnnnnnnnnnnnnnnnnnnnnnnnnnnnnnnnnnnnnnnnnnnnnnnnnnnnnnnnnnnnnnnnnnnnnnnnnnnnnnnnnnnnnnnnnnnnnnnnnnnnnnnnnnnnnnnnnnnnnnnnnnnnnnnnnnnnnnnnnnnnnnnnnnnnnnnnnnnnnnnnnnnnnnnnnnnnnnnnnnnnnnnnnnnnnnnnnnnnnnnnnnnnnnnnnnnnnnnnnnnnnnnnnnnnnnnnnnnnnnnnnnnnnnnnnnnnnnnnnnnnnnnnnnnnnnnnnnnnnnnnnnnnnnnnnnnnnnnnnnnnnnnnnnnnnnnnnnnnnnnnnnnnnnnnnnnnnnnnnnnnnnnnnnnnnnnnnnnnnnnnnnnnnnnnnnnnnnnnnnnnnnnnnnnnnnnnnnnnnnnnnnnnnnnnnnnnnnnnnnnnnnnnnnnnnnnnnnnnnnnnnnnnnnnnnnnnnnnnnnnnnnnnnnnnnnnnnnnnnnnnnnnnnnnnnnnnnnnnnnnnnnnnnnnnnnnnnnnnnnnnnnnnnnnnnnnnnnnnnnnnnnnnnnnnnnnnnnnnnnnnnnnnnnnnnnnnnnnnnnnnnnnnnnnnnnnnnnnnnnnnnnnnnnnnnnnnnnnnnnnnnnnnnnnnnnnnnnnnnnnnnnnnnnnnnnnnnnnnnnnnnnnnnnnnnnnnnnnnnnnnnnnnnnnnnnnnnnnnnnnnnnnnnnnnnnnnnnnnnnnnnnnnnnnnnnnnnnnnnnnnnnnnnnnnnnnnnnnnnnnnnnnnnnnnnnnnnnnnnnnnnnnnnnnnnnnnnnnnnnnnnnnnnnnnnnnnnnnnnnnnnnnnnnnnnnnnnnnnnnnnnnnnnnnnnnnnnnnnnnnnnnnnnnnnnnnnnnnnnnnnnnnnnnnnnnnnnnnnnnnnnnnnnnnnnnnnnnnnnnnnnnnnnnnnnnnnnnnnnnnnnnnnnnnnnnnnnnnnnnnnnnnnnnnnnnnnnnnnnnnnnnnnnnnnnnnnnnnnnnnnnnnnnnnnnnnnnnnnnnnnnnnnnnnnnnnnnnnnnnnnnnnnnnnnnnnnnnnnnnnnnnnnnnnnnnnnnnnnnnnnnnnnnnnnnnnnnnnnnnnnnnnnnnnnnnnnnnnnnnnnnnnnnnnnnnnnnnnnnnnnnnnnnnnnnnnnnnnnnnnnnnnnnnnnnnnnnnnnnnnnnnnnnnnnnnnnnnnnnnnnnnnnnnnnnnnnnnnnnnnnnnnnnnnnnnnnnnnnnnnnnnnnnnnnnnnnnnnnnnnnnnnnnnnnnnnnnnnnnnnnnnnnnnnnnnnnnnnnnnnnnnnnnnnnnnnnnnnnnnnnnnnnnnnnnnnnnnnnnnnnnnnnnnnnnnnnnnnnnnnnnnnnnnnnnnnnnnnnnnnnnnnnnnnnnnnnnnnnnnnnnnnnnnnnnnnnnnnnnnnnnnnnnnnnnnnnnnnnnnnnnnnnnnnnnnnnnnnnnnnnnnnnnnnnnnnnnnnnnnnnnnnnnnnnnnnnnnnnnnnnnnnnnnnnnnnnnnnnnnnnnnnnnnnnnnnnnnnnnnnnnnnnnnnnnnnnnnnnnnnnnnnnnnnnnnnnnnnnnnnnnnnnnnnnnnnnnnnnnnnnnnnnnnnnnnnnnnnnnnnnnnnnnnnnnnnnnnnnnnnnnnnnnnnnnnnnnnnnnnnnnnnnnnnnnnnnnnnnnnnnnnnnnnnnnnnnnnnnnnnnnnnnnnnnnnnnnnnnnnnnnnnnnnnnnnnnnnnnnnnnnnnnnnnnnnnnnnnnnnnnnnnnnnnnnnnnnnnnnnnnnnnnnnnnnnnnnnnnnnnnnnnnnnnnnnnnnnnnnnnnnnnnnnnnnnnnnnnnnnnnnnnnnnnnnnnnnnnnnnnnnnnnnnnnnnnnnnnnnnnnnnnnnnnnnnnnnnnnnnnnnnnnnnnnnnnnnnnnnnnnnnnnnnnnnnnnnnnnnnnnnnnnnnnnnnnnnnnnnnnnnnnnnnnnnnnnnnnnnnnnnnnnnnnnnnnnnnnnnnnnnnnnnnnnnnnnnnnnnnnnnnnnnnnnnnnnnnnnnnnnnnnnnnnnnnnnnnnnnnnnnnnnnnnnnnnnnnnnnnnnnnnnnnnnnnnnnnnnnnnnnnnnnnnnnnnnnnnnnnnnnnnnnnnnnnnnnnnnnnnnnnnnnnnnnnnnnnnnnnnnnnnnnnnnnnnnnnnnnnnnnnnnnnnnnnnnnnnnnnnnnnnnnnnnnnnnnnnnnnnnnnnnnnnnnnnnnnnnnnnnnnnnnnnnnnnnnnnnnnnnnnnnnnnnnnnnnnnnnnnnnnnnnnnnnnnnnnnnnnnnnnnnnnnnnnnnnnnnnnnnnnnnnnnnnnnnnnnnnnnnnnnnnnnnnnnnnnnnnnnnnnnnnnnnnnnnnnnnnnnnnnnnnnnnnnnnnnnnnnnnnnnnnnnnnnnnnnnnnnnnnnnnnnnnnnnnnnnnnnnnnnnnnnnnnnnnnnnnnnnnnnnnnnnnnnnnnnnnnnnnnnnnnnnnnnnnnnnnnnnnnnnnnnnnnnnnnnnnnnnnnnnnnnnnnnnnnnnnnnnnnnnnnnnnnnnnnnnnnnnnnnnnnnnnnnnnnnnnnnnnnnnnnnnnnnnnnnnnnnnnnnnnnnnnnnnnnnnnnnnnnnnnnnnnnnnnnnnnnnnnnnnnnnnnnnnnnnnnnnnnnnnnnnnnnnnnnnnnnnnnnnnnnnnnnnnnnnnnnnnnnnnnnnnnnnnnnnnnnnnnnnnnnnnnnnnnnnnnnnnnnnnnnnnnnnnnnnnnnnnnnnnnnnnnnnnnnnnnnnnnnnnnnnnnnnnnnnnnnnnnnnnnnnnnnnnnnnnnnnnnnnnnnnnnnnnnnnnnnnnnnnnnnnnnnnnnnnnnnnnnnnnnnnnnnnnnnnnnnnnnnnnnnnnnnnnnnnnnnnnnnnnnnnnnnnnnnnnnnnnnnnnnnnnnnnnnnnnnnnnnnnnnnnnnnnnnnnnnnnnnnnnnnnnnnnnnnnnnnnnnnnnnnnnnnnnnnnnnnnnnnnnnnnnnnnnnnnnnnnnnnnnnnnnnnnnnnnnnnnnnnnnnnnnnnnnnnnnnnnnnnnnnnnnnnnnnnnnnnnnnnnnnnnnnnnnnnnnnnnnnnnnnnnnnnnnnnnnnnnnnnnnnnnnnnnnnnnnnnnnnnnnnnnnnnnnnnnnnnnnnnnnnnnnnnnnnnnnnnnnnnnnnnnnnnnnnnnnnnnnnnnnnnnnnnnnnnnnnnnnnnnnnnnnnnnnnnnnnnnnnnnnnnnnnnnnnnnnnnnnnnnnnnnnnnnnnnnnnnnnnnnnnnnnnnnnnnnnnnnnnnnnnnnnnnnnnnnnnnnnnnnnnnnnnnnnnnnnnnnnnnnnnnnnnnnnnnnnnnnnnnnnnnnnnnnnnnnnnnnnnnnnnnnnnnnnnnnnnnnnnnnnnnnnnnnnnnnnnnnnnnnnnnnnnnnnnnnnnnnnnnnnnnnnnnnnnnnnnnnnnnnnnnnnnnnnnnnnnnnnnnnnnnnnnnnnnnnnnnnnnnnnnnnnnnnnnnnnnnnnnnnnnnnnnnnnnnnnnnnnnnnnnnnnnnnnnnnnnnnnnnnnnnnnnnnnnnnnnnnnnnnnnnnnnnnnnnnnnnnnnnnnnnnnnnnnnnnnnnnnnnnnnnnnnnnnnnnnnnnnnnnnnnnnnnnnnnnnnnnnnnnnnnnnnnnnnnnnnnnnnnnnnnnnnnnnnnnnnnnnnnnnnnnnnnnnnnnnnnnnnnnnnnnnnnnnnnnnnnnnnnnnnnnnnnnnnnnnnnnnnnnnnnnnnnnnnnnnnnnnnnnnnnnnnnnnnnnnnnnnnnnnnnnnnnnnnnnnnnnnnnnnnnnnnnnnnnnnnnnnnnnnnnnnnnnnnnnnnnnnnnnnnnnnnnnnnnnnnnnnnnnnnnnnnnnnnnnnnnnnnnnnnnnnnnnnnnnnnnnnnnnnnnnnnnnnnnnnnnnnnnnnnnnnnnnnnnnnnnnnnnnnnnnnnnnnnnnnnnnnnnnnnnnnnnnnnnnnnnnnnnnnnnnnnnnnnnnnnnnnnnnnnnnnnnnnnnnnnnnnnnnnnnnnnnnnnnnnnnnnnnnnnnnnnnnnnnnnnnnnnnnnnnnnnnnnnnnnnnnnnnnnnnnnnnnnnnnnnnnnnnnnnnnnnnnnnnnnnnnnnnnnnnnnnnnnnnnnnnnnnnnnnnnnnnnnnnnnnnnnnnnnnnnnnnnnnnnnnnnnnnnnnnnnnnnnnnnnnnnnnnnnnnnnnnnnnnnnnnnnnnnnnnnnnnnnnnnnnnnnnnnnnnnnnnnnnnnnnnnnnnnnnnnnnnnnnnnnnnnnnnnnnnnnnnnnnnnnnnnnnnnnnnnnnnnnnnnnnnnnnnnnnnnnnnnnnnnnnnnnnnnnnnnnnnnnnnnnnnnnnnnnnnnnnnnnnnnnnnnnnnnnnnnnnnnnnnnnnnnnnnnnnnnnnnnnnnnnnnnnnnnnnnnnnnnnnnnnnnnnnnnnnnnnnnnnnnnnnnnnnnnnnnnnnnnnnnnnnnnnnnnnnnnnnnnnnnnnnnnnnnnnnnnnnnnnnnnnnnnnnnnnnnnnnnnnnnnnnnnnnnnnnnnnnnnnnnnnnnnnnnnnnnnnnnnnnnnnnnnnnnnnnnnnnnnnnnnnnnnnnnnnnnnnnnnnnnnnnnnnnnnnnnnnnnnnnnnnnnnnnnnnnnnnnnnnnnnnnnnnnnnnnnnnnnnnnnnnnnnnnnnnnnnnnnnnnnnnnnnnnnnnnnnnnnnnnnnnnnnnnnnnnnnnnnnnnnnnnnnnnnnnnnnnnnnnnnnnnnnnnnnnnnnnnnnnnnnnnnnnnnnnnnnnnnnnnnnnnnnnnnnnnnnnnnnnnnnnnnnnnnnnnnnnnnnnnnnnnnnnnnnnnnnnnnnnnnnnnnnnnnnnnnnnnnnnnnnnnnnnnnnnnnnnnnnnnnnnnnnnnnnnnnnnnnnnnnnnnnnnnnnnnnnnnnnnnnnnnnnnnnnnnnnnnnnnnnnnnnnnnnnnnnnnnnnnnnnnnnnnnnnnnnnnnnnnnnnnnnnnnnnnnnnnnnnnnnnnnnnnnnnnnnnnnnnnnnnnnnnnnnnnnnnnnnnnnnnnnnnnnnnnnnnnnnnnnnnnnnnnnnnnnnnnnnnnnnnnnnnnnnnnnnnnnnnnnnnnnnnnnnnnnnnnnnnnnnnnnnnnnnnnnnnnnnnnnnnnnnnnnnnnnnnnnnnnnnnnnnnnnnnnnnnnnnnnnnnnnnnnnnnnnnnnnnnnnnnnnnnnnnnnnnnnnnnnnnnnnnnnnnnnnnnnnnnnnnnnnnnnnnnnnnnnnnnnnnnnnnnnnnnnnnnnnnnnnnnnnnnnnnnnnnnnnnnnnnnnnnnnnnnnnnnnnnnnnnnnnnnnnnnnnnnnnnnnnnnnnnnnnnnnnnnnnnnnnnnnnnnnnnnnnnnnnnnnnnnnnnnnnnnnnnnnnnnnnnnnnnnnnnnnnnnnnnnnnnnnnnnnnnnnnnnnnnnnnnnnnnnnnnnnnnnnnnnnnnnnnnnnnnnnnnnnnnnnnnnnnnnnnnnnnnnnnnnnnnnnnnnnnnnnnnnnnnnnnnnnnnnnnnnnnnnnnnnnnnnnnnnnnnnnnnnnnnnnnnnnnnnnnnnnnnnnnnnnnnnnnnnnnnnnnnnnnnnnnnnnnnnnnnnnnnnnnnnnnnnnnnnnnnnnnnnnnnnnnnnnnnnnnnnnnnnnnnnnnnnnnnnnnnnnnnnnnnnnnnnnnnnnnnnnnnnnnnnnnnnnnnnnnnnnnnnnnnnnnnnnnnnnnnnnnnnnnnnnnnnnnnnnnnnnnnnnnnnnnnnnnnnnnnnnnnnnnnnnnnnnnnnnnnnnnnnnnnnnnnnnnnnnnnnnnnnnnnnnnnnnnnnnnnnnnnnnnnnnnnnnnnnnnnnnnnnnnnnnnnnnnnnnnnnnnnnnnnnnnnnnnnnnnnnnnnnnnnnnnnnnnnnnnnnnnnnnnnnnnnnnnnnnnnnnnnnnnnnnnnnnnnnnnnnnnnnnnnnnnnnnnnnnnnnnnnnnnnnnnnnnnnnnnnnnnnnnnnnnnnnnnnnnnnnnnnnnnnnnnnnnnnnnnnnnnnnnnnnnnnnnnnnnnnnnnnnnnnnnnnnnnnnnnnnnnnnnnnnnnnnnnnnnnnnnnnnnnnnnnnnnnnnnnnnnnnnnnnnnnnnnnnnnnnnnnnnnnnnnnnnnnnnnnnnnnnnnnnnnnnnnnnnnnnnnnnnnnnnnnnnnnnnnnnnnnnnnnnnnnnnnnnnnnnnnnnnnnnnnnnnnnnnnnnnnnnnnnnnnnnnnnnnnnnnnnnnnnnnnnnnnnnnnnnnnnnnnnnnnnnnnnnnnnnnnnnnnnnnnnnnnnnnnnnnnnnnnnnnnnnnnnnnnnnnnnnnnnnnnnnnnnnnnnnnnnnnnnnnnnnnnnnnnnnnnnnnnnnnnnnnnnnnnnnnnnnnnnnnnnnnnnnnnnnnnnnnnnnnnnnnnnnnnnnnnnnnnnnnnnnnnnnnnnnnnnnnnnnnnnnnnnnnnnnnnnnnnnnnnnnnnnnnnnnnnnnnnnnnnnnnnnnnnnnnnnnnnnnnnnnnnnnnnnnnnnnnnnnnnnnnnnnnnnnnnnnnnnnnnnnnnnnnnnnnnnnnnnnnnnnnnnnnnnnnnnnnnnnnnnnnnnnnnnnnnnnnnnnnnnnnnnnnnnnnnnnnnnnnnnnnnnnnnnnnnnnnnnnnnnnnnnnnnnnnnnnnnnnnnnnnnnnnnnnnnnnnnnnnnnnnnnnnnnnnnnnnnnnnnnnnnnnnnnnnnnnnnnnnnnnnnnnnnnnnnnnnnnnnnnnnnnnnnnnnnnnnnnnnnnnnnnnnnnnnnnnnnnnnnnnnnnnnnnnnnnnnnnnnnnnnnnnnnnnnnnnnnnnnnnnnnnnnnnnnnnnnnnnnnnnnnnnnnnnnnnnnnnnnnnnnnnnnnnnnnnnnnnnnnnnnnnnnnnnnnnnnnnnnnnnnnnnnnnnnnnnnnnnnnnnnnnnnnnnnnnnnnnnnnnnnnnnnnnnnnnnnnnnnnnnnnnnnnnnnnnnnnnnnnnnnnnnnnnnnnnnnnnnnnnnnnnnnnnnnnnnnnnnnnnnnnnnnnnnnnnnnnnnnnnnnnnnnnnnnnnnnnnnnnnnnnnnnnnnnnnnnnnnnnnnnnnnnnnnnnnnnnnnnnnnnnnnnnnnnnnnnnnnnnnnnnnnnnnnnnnnnnnnnnnnnnnnnnnnnnnnnnnnnnnnnnnnnnnnnnnnnnnnnnnnnnnnnnnnnnnnnnnnnnnnnnnnnnnnnnnnnnnnnnnnnnnnnnnnnnnnnnnnnnnnnnnnnnnnnnnnnnnnnnnnnnnnnnnnnnnnnnnnnnnnnnnnnnnnnnnnnnnnnnnnnnnnnnnnnnnnnnnnnnnnnnnnnnnnnnnnnnnnnnnnnnnnnnnnnnnnnnnnnnnnnnnnnnnnnnnnnnnnnnnnnnnnnnnnnnnnnnnnnnnnnnnnnnnnnnnnnnnnnnnnnnnnnnnnnnnnnnnnnnnnnnnnnnnnnnnnnnnnnnnnnnnnnnnnnnnnnnnnnnnnnnnnnnnnnnnnnnnnnnnnnnnnnnnnnnnnnnnnnnnnnnnnnnnnnnnnnnnnnnnnnnnnnnnnnnnnnnnnnnnnnnnnnnnnnnnnnnnnnnnnnnnnnnnnnnnnnnnnnnnnnnnnnnnnnnnnnnnnnnnnnnnnnnnnnnnnnnnnnnnnnnnnnnnnnnnnnnnnnnnnnnnnnnnnnnnnnnnnnnnnnnnnnnnnnnnnnnnnnnnnnnnnnnnnnnnnnnnnnnnnnnnnnnnnnnnnnnnnnnnnnnnnnnnnnnnnnnnnnnnnnnnnnnnnnnnnnnnnnnnnnnnnnnnnnnnnnnnnnnnnnnnnnnnnnnnnnnnnnnnnnnnnnnnnnnnnnnnnnnnnnnnnnnnnnnnnnnnnnnnnnnnnnnnnnnnnnnnnnnnnnnnnnnnnnnnnnnnnnnnnnnnnnnnnnnnnnnnnnnnnnnnnnnnnnnnnnnnnnnnnnnnnnnnnnnnnnnnnnnnnnnnnnnnnnnnnnnnnnnnnnnnnnnnnnnnnnnnnnnnnnnnnnnnnnnnnnnnnnnnnnnnnnnnnnnnnnnnnnnnnnnnnnnnnnnnnnnnnnnnnnnnnnnnnnnnnnnnnnnnnnnnnnnnnnnnnnnnnnnnnnnnnnnnnnnnnnnnnnnnnnnnnnnnnnnnnnnnnnnnnnnnnnnnnnnnnnnnnnnnnnnnnnnnnnnnnnnnnnnnnnnnnnnnnnnnnnnnnnnnnnnnnnnnnnnnnnnnnnnnnnnnnnnnnnnnnnnnnnnnnnnnnnnnnnnnnnnnnnnnnnnnnnnnnnnnnnnnnnnnnnnnnnnnnnnnnnnnnnnnnnnnnnnnnnnnnnnnnnnnnnnnnnnnnnnnnnnnnnnnnnnnnnnnnnnnnnnnnnnnnnnnnnnnnnnnnnnnnnnnnnnnnnnnnnnnnnnnnnnnnnnnnnnnnnnnnnnnnnnnnnnnnnnnnnnnnnnnnnnnnnnnnnnnnnnnnnnnnnnnnnnnnnnnnnnnnnnnnnnnnnnnnnnnnnnnnnnnnnnnnnnnnnnnnnnnnnnnnnnnnnnnnnnnnnnnnnnnnnnnnnnnnnnnnnnnnnnnnnnnnnnnnnnnnnnnnnnnnnnnnnnnnnnnnnnnnnnnnnnnnnnnnnnnnnnnnnnnnnnnnnnnnnnnnnnnnnnnnnnnnnnnnnnnnnnnnnnnnnnnnnnnnnnnnnnnnnnnnnnnnnnnnnnnnnnnnnnnnnnnnnnnnnnnnnnnnnnnnnnnnnnnnnnnnnnnnnnnnnnnnnnnnnnnnnnnnnnnnnnnnnnnnnnnnnnnnnnnnnnnnnnnnnnnnnnnnnnnnnnnnnnnnnnnnnnnnnnnnnnnnnnnnnnnnnnnnnnnnnnnnnnnnnnnnnnnnnnnnnnnnnnnnnnnnnnnnnnnnnnnnnnnnnnnnnnnnnnnnnnnnnnnnnnnnnnnnnnnnnnnnnnnnnnnnnnnnnnnnnnnnnnnnnnnnnnnnnnnnnnnnnnnnnnnnnnnnnnnnnnnnnnnnnnnnnnnnnnnnnnnnnnnnnnnnnnnnnnnnnnnnnnnnnnnnnnnnnnnnnnnnnnnnnnnnnnnnnnnnnnnnnnnnnnnnnnnnnnnnnnnnnnnnnnnnnnnnnnnnnnnnnnnnnnnnnnnnnnnnnnnnnnnnnnnnnnnnnnnnnnnnnnnnnnnnnnnnnnnnnnnnnnnnnnnnnnnnnnnnnnnnnnnnnnnnnnnnnnnnnnnnnnnnnnnnnnnnnnnnnnnnnnnnnnnnnnnnnnnnnnnnnnnnnnnnnnnnnnnnnnnnnnnnnnnnnnnnnnnnnnnnnnnnnnnnnnnnnnnnnnnnnnnnnnnnnnnnnnnnnnnnnnnnnnnnnnnnnnnnnnnnnnnnnnnnnnnnnnnnnnnnnnnnnnnnnnnnnnnnnnnnnnnnnnnnnnnnnnnnnnnnnnnnnnnnnnnnnnnnnnnnnnnnnnnnnnnnnnnnnnnnnnnnnnnnnnnnnnnnnnnnnnnnnnnnnnnnnnnnnnnnnnnnnnnnnnnnnnnnnnnnnnnnnnnnnnnnnnnnnnnnnnnnnnnnnnnnnnnnnnnnnnnnnnnnnnnnnnnnnnnnnnnnnnnnnnnnnnnnnnnnnnnnnnnnnnnnnnnnnnnnnnnnnnnnnnnnnnnnnnnnnnnnnnnnnnnnnnnnnnnnnnnnnnnnnnnnnnnnnnnnnnnnnnnnnnnnnnnnnnnnnnnnnnnnnnnnnnnnnnnnnnnnnnnnnnnnnnnnnnnnnnnnnnnnnnnnnnnnnnnnnnnnnnnnnnnnnnnnnnnnnnnnnnnnnnnnnnnnnnnnnnnnnnnnnnnnnnnnnnnnnnnnnnnnnnnnnnnnnnnnnnnnnnnnnnnnnnnnnnnnnnnnnnnnnnnnnnnnnnnnnnnnnnnnnnnnnnnnnnnnnnnnnnnnnnnnnnnnnnnnnnnnnnnnnnnnnnnnnnnnnnnnnnnnnnnnnnnnnnnnnnnnnnnnnnnnnnnnnnnnnnnnnnnnnnnnnnnnnnnnnnnnnnnnnnnnnnnnnnnnnnnnnnnnnnnnnnnnnnnnnnnnnnnnnnnnnnnnnnnnnnnnnnnnnnnnnnnnnnnnnnnnnnnnnnnnnnnnnnnnnnnnnnnnnnnnnnnnnnnnnnnnnnnnnnnnnnnnnnnnnnnnnnnnnnnnnnnnnnnnnnnnnnnnnnnnnnnnnnnnnnnnnnnnnnnnnnnnnnnnnnnnnnnnnnnnnnnnnnnnnnnnnnnnnnnnnnnnnnnnnnnnnnnnnnnnnnnnnnnnnnnnnnnnnnnnnnnnnnnnnnnnnnnnnnnnnnnnnnnnnnnnnnnnnnnnnnnnnnnnnnnnnnnnnnnnnnnnnnnnnnnnnnnnnnnnnnnnnnnnnnnnnnnnnnnnnnnnnnnnnnnnnnnnnnnnnnnnnnnnnnnnnnnnnnnnnnnnnnnnnnnnnnnnnnnnnnnnnnnnnnnnnnnnnnnnnnnnnnnnnnnnnnnnnnnnnnnnnnnnnnnnnnnnnnnnnnnnnnnnnnnnnnnnnnnnnnnnnnnnnnnnnnnnnnnnnnnnnnnnnnnnnnnnnnnnnnnnnnnnnnnnnnnnnnnnnnnnnnnnnnnnnnnnnnnnnnnnnnnnnnnnnnnnnnnnnnnnnnnnnnnnnnnnnnnnnnnnnnnnnnnnnnnnnnnnnnnnnnnnnnnnnnnnnnnnnnnnnnnnnnnnnnnnnnnnnnnnnnnnnnnnnnnnnnnnnnnnnnnnnnnnnnnnnnnnnnnnnnnnnnnnnnnnnnnnnnnnnnnnnnnnnnnnnnnnnnnnnnnnnnnnnnnnnnnnnnnnnnnnnnnnnnnnnnnnnnnnnnnnnnnnnnnnnnnnnnnnnnnnnnnnnnnnnnnnnnnnnnnnnnnnnnnnnnnnnnnnnnnnnnnnnnnnnnnnnnnnnnnnnnnnnnnnnnnnnnnnnnnnnnnnnnnnnnnnnnnnnnnnnnnnnnnnnnnnnnnnnnnnnnnnnnnnnnnnnnnnnnnnnnnnnnnnnnnnnnnnnnnnnnnnnnnnnnnnnnnnnnnnnnnnnnnnnnnnnnnnnnnnnnnnnnnnnnnnnnnnnnnnnnnnnnnnnnnnnnnnnnnnnnnnnnnnnnnnnnnnnnnnnnnnnnnnnnnnnnnnnnnnnnnnnnnnnnnnnnnnnnnnnnnnnnnnnnnnnnnnnnnnnnnnnnnnnnnnnnnnnnnnnnnnnnnnnnnnnnnnnnnnnnnnnnnnnnnnnnnnnnnnnnnnnnnnnnnnnnnnnnnnnnnnnnnnnnnnnnnnnnnnnnnnnnnnnnnnnnnnnnnnnnnnnnnnnnnnnnnnnnnnnnnnnnnnnnnnnnnnnnnnnnnnnnnnnnnnnnnnnnnnnnnnnnnnnnnnnnnnnnnnnnnnnnnnnnnnnnnnnnnnnnnnnnnnnnnnnnnnnnnnnnnnnnnnnnnnnnnnnnnnnnnnnnnnnnnnnnnnnnnnnnnnnnnnnnnnnnnnnnnnnnnnnnnnnnnnnnnnnnnnnnnnnnnnnnnnnnnnnnnnnnnnnnnnnnnnnnnnnnnnnnnnnnnnnnnnnnnnnnnnnnnnnnnnnnnnnnnnnnnnnnnnnnnnnnnnnnnnnnnnnnnnnnnnnnnnnnnnnnnnnnnnnnnnnnnnnnnnnnnnnnnnnnnnnnnnnnnnnnnnnnnnnnnnnnnnnnnnnnnnnnnnnnnnnnnnnnnnnnnnnnnnnnnnnnnnnnnnnnnnnnnnnnnnnnnnnnnnnnnnnnnnnnnnnnnnnnnnnnnnnnnnnnnnnnnnnnnnnnnnnnnnnnnnnnnnnnnnnnnnnnnnnnnnnnnnnnnnnnnnnnnnnnnnnnnnnnnnnnnnnnnnnnnnnnnnnnnnnnnnnnnnnnnnnnnnnnnnnnnnnnnnnnnnnnnnnnnnnnnnnnnnnnnnnnnnnnnnnnnnnnnnnnnnnnnnnnnnnnnnnnnnnnnnnnnnnnnnnnnnnnnnnnnnnnnnnnnnnnnnnnnnnnnnnnnnnnnnnnnnnnnnnnnnnnnnnnnnnnnnnnnnnnnnnnnnnnnnnnnnnnnnnnnnnnnnnnnnnnnnnnnnnnnnnnnnnnnnnnnnnnnnnnnnnnnnnnnnnnnnnnnnnnnnnnnnnnnnnnnnnnnnnnnnnnnnnnnnnnnnnnnnnnnnnnnnnnnnnnnnnnnnnnnnnnnnnnnnnnnnnnnnnnnnnnnnnnnnnnnnnnnnnnnnnnnnnnnnnnnnnnnnnnnnnnnnnnnnnnnnnnnnnnnnnnnnnnnnnnnnnnnnnnnnnnnnnnnnnnnnnnnnnnnnnnnnnnnnnnnnnnnnnnnnnnnnnnnnnnnnnnnnnnnnnnnnnnnnnnnnnnnnnnnnnnnnnnnnnnnnnnnnnnnnnnnnnnnnnnnnnnnnnnnnnnnnnnnnnnnnnnnnnnnnnnnnnnnnnnnnnnnnnnnnnnnnnnnnnnnnnnnnnnnnnnnnnnnnnnnnnnnnnnnnnnnnnnnnnnnnnnnnnnnnnnnnnnnnnnnnnnnnnnnnnnnnnnnnnnnnnnnnnnnnnnnnnnnnnnnnnnnnnnnnnnnnnnnnnnnnnnnnnnnnnnnnnnnnnnnnnnnnnnnnnnnnnnnnnnnnnnnnnnnnnnnnnnnnnnnnnnnnnnnnnnnnnnnnnnnnnnnnnnnnnnnnnnnnnnnnnnnnnnnnnnnnnnnnnnnnnnnnnnnnnnnnnnnnnnnnnnnnnnnnnnnnnnnnnnnnnnnnnnnnnnnnnnnnnnnnnnnnnnnnnnnnnnnnnnnnnnnnnnnnnnnnnnnnnnnnnnnnnnnnnnnnnnnnnnnnnnnnnnnnnnnnnnnnnnnnnnnnnnnnnnnnnnnnnnnnnnnnnnnnnnnnnnnnnnnnnnnnnnnnnnnnnnnnnnnnnnnnnnnnnnnnnnnnnnnnnnnnnnnnnnnnnnnnnnnnnnnnnnnnnnnnnnnnnnnnnnnnnnnnnnnnnnnnnnnnnnnnnnnnnnnnnnnnnnnnnnnnnnnnnnnnnnnnnnnnnnnnnnnnnnnnnnnnnnnnnnnnnnnnnnnnnnnnnnnnnnnnnnnnnnnnnnnnnnnnnnnnnnnnnnnnnnnnnnnnnnnnnnnnnnnnnnnnnnnnnnnnnnnnnnnnnnnnnnnnnnnnnnnnnnnnnnnnnnnnnnnnnnnnnnnnnnnnnnnnnnnnnnnnnnnnnnnnnnnnnnnnnnnnnnnnnnnnnnnnnnnnnnnnnnnnnnnnnnnnnnnnnnnnnnnnnnnnnnnnnnnnnnnnnnnnnnnnnnnnnnnnnnnnnnnnnnnnnnnnnnnnnnnnnnnnnnnnnnnnnnnnnnnnnnnnnnnnnnnnnnnnnnnnnnnnnnnnnnnnnnnnnnnnnnnnnnnnnnnnnnnnnnnnnnnnnnnnnnnnnnnnnnnnnnnnnnnnnnnnnnnnnnnnnnnnnnnnnnnnnnnnnnnnnnnnnnnnnnnnnnnnnnnnnnnnnnnnnnnnnnnnnnnnnnnnnnnnnnnnnnnnnnnnnnnnnnnnnnnnnnnnnnnnnnnnnnnnnnnnnnnnnnnnnnnnnnnnnnnnnnnnnnnnnnnnnnnnnnnnnnnnnnnnnnnnnnnnnnnnnnnnnnnnnnnnnnnnnnnnnnnnnnnnnnnnnnnnnnnnnnnnnnnnnnnnnnnnnnnnnnnnnnnnnnnnnnnnnnnnnnnnnnnnnnnnnnnnnnnnnnnnnnnnnnnnnnnnnnnnnnnnnnnnnnnnnnnnnnnnnnnnnnnnnnnnnnnnnnnnnnnnnnnnnnnnnnnnnnnnnnnnnnnnnnnnnnnnnnnnnnnnnnnnnnnnnnnnnnnnnnnnnnnnnnnnnnnnnnnnnnnnnnnnnnnnnnnnnnnnnnnnnnnnnnnnnnnnnnnnnnnnnnnnnnnnnnnnnnnnnnnnnnnnnnnnnnnnnnnnnnnnnnnnnnnnnnnnnnnnnnnnnnnnnnnnnnnnnnnnnnnnnnnnnnnnnnnnnnnnnnnnnnnnnnnnnnnnnnnnnnnnnnnnnnnnnnnnnnnnnnnnnnnnnnnnnnnnnnnnnnnnnnnnnnnnnnnnnnnnnnnnnnnnnnnnnnnnnnnnnnnnnnnnnnnnnnnnnnnnnnnnnnnnnnnnnnnnnnnnnnnnnnnnnnnnnnnnnnnnnnnnnnnnnnnnnnnnnnnnnnnnnnnnnnnnnnnnnnnnnnnnnnnnnnnnnnnnnnnnnnnnnnnnnnnnnnnnnnnnnnnnnnnnnnnnnnnnnnnnnnnnnnnnnnnnnnnnnnnnnnnnnnnnnnnnnnnnnnnnnnnnnnnnnnnnnnnnnnnnnnnnnnnnnnnnnnnnnnnnnnnnnnnnnnnnnnnnnnnnnnnnnnnnnnnnnnnnnnnnnnnnnnnnnnnnnnnnnnnnnnnnnnnnnnnnnnnnnnnnnnnnnnnnnnnnnnnnnnnnnnnnnnnnnnnnnnnnnnnnnnnnnnnnnnnnnnnnnnnnnnnnnnnnnnnnnnnnnnnnnnnnnnnnnnnnnnnnnnnnnnnnnnnnnnnnnnnnnnnnnnnnnnnnnnnnnnnnnnnnnnnnnnnnnnnnnnnnnnnnnnnnnnnnnnnnnnnnnnnnnnnnnnnnnnnnnnnnnnnnnnnnnnnnnnnnnnnnnnnnnnnnnnnnnnnnnnnnnnnnnnnnnnnnnnnnnnnnnnnnnnnnnnnnnnnnnnnnnnnnnnnnnnnnnnnnnnnnnnnnnnnnnnnnnnnnnnnnnnnnnnnnnnnnnnnnnnnnnnnnnnnnnnnnnnnnnnnnnnnnnnnnnnnnnnnnnnnnnnnnnnnnnnnnnnnnnnnnnnnnnnnnnnnnnnnnnnnnnnnnnnnnnnnnnnnnnnnnnnnnnnnnnnnnnnnnnnnnnnnnnnnnnnnnnnnnnnnnnnnnnnnnnnnnnnnnnnnnnnnnnnnnnnnnnnnnnnnnnnnnnnnnnnnnnnnnnnnnnnnnnnnnnnnnnnnnnnnnnnnnnnnnnnnnnnnnnnnnnnnnnnnnnnnnnnnnnnnnnnnnnnnnnnnnnnnnnnnnnnnnnnnnnnnnnnnnnnnnnnnnnnnnnnnnnnnnnnnnnnnnnnnnnnnnnnnnnnnnnnnnnnnnnnnnnnnnnnnnnnnnnnnnnnnnnnnnnnnnnnnnnnnnnnnnnnnnnnnnnnnnnnnnnnnnnnnnnnnnnnnnnnnnnnnnnnnnnnnnnnnnnnnnnnnnnnnnnnnnnnnnnnnnnnnnnnnnnnnnnnnnnnnnnnnnnnnnnnnnnnnnnnnnnnnnnnnnnnnnnnnnnnnnnnnnnnnnnnnnnnnnnnnnnnnnnnnnnnnnnnnnnnnnnnnnnnnnnnnnnnnnnnnnnnnnnnnnnnnnnnnnnnnnnnnnnnnnnnnnnnnnnnnnnnnnnnnnnnnnnnnnnnnnnnnnnnnnnnnnnnnnnnnnnnnnnnnnnnnnnnnnnnnnnnnnnnnnnnnnnnnnnnnnnnnnnnnnnnnnnnnnnnnnnnnnnnnnnnnnnnnnnnnnnnnnnnnnnnnnnnnnnnnnnnnnnnnnnnnnnnnnnnnnnnnnnnnnnnnnnnnnnnnnnnnnnnnnnnnnnnnnnnnnnnnnnnnnnnnnnnnnnnnnnnnnnnnnnnnnnnnnnnnnnnnnnnnnnnnnnnnnnnnnnnnnnnnnnnnnnnnnnnnnnnnnnnnnnnnnnnnnnnnnnnnnnnnnnnnnnnnnnnnnnnnnnnnnnnnnnnnnnnnnnnnnnnnnnnnnnnnnnnnnnnnnnnnnnnnnnnnnnnnnnnnnnnnnnnnnnnnnnnnnnnnnnnnnnnnnnnnnnnnnnnnnnnnnnnnnnnnnnnnnnnnnnnnnnnnnnnnnnnnnnnnnnnnnnnnnnnnnnnnnnnnnnnnnnnnnnnnnnnnnnnnnnnnnnnnnnnnnnnnnnnnnnnnnnnnnnnnnnnnnnnnnnnnnnnnnnnnnnnnnnnnnnnnnnnnnnnnnnnnnnnnnnnnnnnnnnnnnnnnnnnnnnnnnnnnnnnnnnnnnnnnnnnnnnnnnnnnnnnnnnnnnnnnnnnnnnnnnnnnnnnnnnnnnnnnnnnnnnnnnnnnnnnnnnnnnnnnnnnnnnnnnnnnnnnnnnnnnnnnnnnnnnnnnnnnnnnnnnnnnnnnnnnnnnnnnnnnnnnnnnnnnnnnnnnnnnnnnnnnnnnnnnnnnnnnnnnnnnnnnnnnnnnnnnnnnnnnnnnnnnnnnnnnnnnnnnnnnnnnnnnnnnnnnnnnnnnnnnnnnnnnnnnnnnnnnnnnnnnnnnnnnnnnnnnnnnnnnnnnnnnnnnnnnnnnnnnnnnnnnnnnnnnnnnnnnnnnnnnnnnnnnnnnnnnnnnnnnnnnnnnnnnnnnnnnnnnnnnnnnnnnnnnnnnnnnnnnnnnnnnnnnnnnnnnnnnnnnnnnnnnnnnnnnnnnnnnnnnnnnnnnnnnnnnnnnnnnnnnnnnnnnnnnnnnnnnnnnnnnnnnnnnnnnnnnnnnnnnnnnnnnnnnnnnnnnnnnnnnnnnnnnnnnnnnnnnnnnnnnnnnnnnnnnnnnnnnnnnnnnnnnnnnnnnnnnnnnnnnnnnnnnnnnnnnnnnnnnnnnnnnnnnnnnnnnnnnnnnnnnnnnnnnnnnnnnnnnnnnnnnnnnnnnnnnnnnnnnnnnnnnnnnnnnnnnnnnnnnnnnnnnnnnnnnnnnnnnnnnnnnnnnnnnnnnnnnnnnnnnnnnnnnnnnnnnnnnnnnnnnnnnnnnnnnnnnnnnnnnnnnnnnnnnnnnnnnnnnnnnnnnnnnnnnnnnnnnnnnnnnnnnnnnnnnnnnnnnnnnnnnnnnnnnnnnnnnnnnnnnnnnnnnnnnnnnnnnnnnnnnnnnnnnnnnnnnnnnnnnnnnnnnnnnnnnnnnnnnnnnnnnnnnnnnnnnnnnnnnnnnnnnnnnnnnnnnnnnnnnnnnnnnnnnnnnnnnnnnnnnnnnnnnnnnnnnnnnnnnnnnnnnnnnnnnnnnnnnnnnnnnnnnnnnnnnnnnnnnnnnnnnnnnnnnnnnnnnnnnnnnnnnnnnnnnnnnnnnnnnnnnnnnnnnnnnnnnnnnnnnnnnnnnnnnnnnnnnnnnnnnnnnnnnnnnnnnnnnnnnnnnnnnnnnnnnnnnnnnnnnnnnnnnnnnnnnnnnnnnnnnnnnnnnnnnnnnnnnnnnnnnnnnnnnnnnnnnnnnnnnnnnnnnnnnnnnnnnnnnnnnnnnnnnnnnnnnnnnnnnnnnnnnnnnnnnnnnnnnnnnnnnnnnnnnnnnnnnnnnnnnnnnnnnnnnnnnnnnnnnnnnnnnnnnnnnnnnnnnnnnnnnnnnnnnnnnnnnnnnnnnnnnnnnnnnnnnnnnnnnnnnnnnnnnnnnnnnnnnnnnnnnnnnnnnnnnnnnnnnnnnnnnnnnnnnnnnnnnnnnnnnnnnnnnnnnnnnnnnnnnnnnnnnnnnnnnnnnnnnnnnnnnnnnnnnnnnnnnnnnnnnnnnnnnnnnnnnnnnnnnnnnnnnnnnnnnnnnnnnnnnnnnnnnnnnnnnnnnnnnnnnnnnnnnnnnnnnnnnnnnnnnnnnnnnnnnnnnnnnnnnnnnnnnnnnnnnnnnnnnnnnnnnnnnnnnnnnnnnnnnnnnnnnnnnnnnnnnnnnnnnnnnnnnnnnnnnnnnnnnnnnnnnnnnnnnnnnnnnnnnnnnnnnnnnnnnnnnnnnnnnnnnnnnnnnnnnnnnnnnnnnnnnnnnnnnnnnnnnnnnnnnnnnnnnnnnnnnnnnnnnnnnnnnnnnnnnnnnnnnnnnnnnnnnnnnnnnnnnnnnnnnnnnnnnnnnnnnnnnnnnnnnnnnnnnnnnnnnnnnnnnnnnnnnnnnnnnnnnnnnnnnnnnnnnnnnnnnnnnnnnnnnnnnnnnnnnnnnnnnnnnnnnnnnnnnnnnnnnnnnnnnnnnnnnnnnnnnnnnnnnnnnnnnnnnnnnnnnnnnnnnnnnnnnnnnnnnnnnnnnnnnnnnnnnnnnnnnnnnnnnnnnnnnnnnnnnnnnnnnnnnnnnnnnnnnnnnnnnnnnnnnnnnnnnnnnnnnnnnnnnnnnnnnnnnnnnnnnnnnnnnnnnnnnnnnnnnnnnnnnnnnnnnnnnnnnnnnnnnnnnnnnnnnnnnnnnnnnnnnnnnnnnnnnnnnnnnnnnnnnnnnnnnnnnnnnnnnnnnnnnnnnnnnnnnnnnnnnnnnnnnnnnnnnnnnnnnnnnnnnnnnnnnnnnnnnnnnnnnnnnnnnnnnnnnnnnnnnnnnnnnnnnnnnnnnnnnnnnnnnnnnnnnnnnnnnnnnnnnnnnnnnnnnnnnnnnnnnnnnnnnnnnnnnnnnnnnnnnnnnnnnnnnnnnnnnnnnnnnnnnnnnnnnnnnnnnnnnnnnnnnnnnnnnnnnnnnnnnnnnnnnnnnnnnnnnnnnnnnnnnnnnnnnnnnnnnnnnnnnnnnnnnnnnnnnnnnnnnnnnnnnnnnnnnnnnnnnnnnnnnnnnnnnnnnnnnnnnnnnnnnnnnnnnnnnnnnnnnnnnnnnnnnnnnnnnnnnnnnnnnnnnnnnnnnnnnnnnnnnnnnnnnnnnnnnnnnnnnnnnnnnnnnnnnnnnnnnnnnnnnnnnnnnnnnnnnnnnnnnnnnnnnnnnnnnnnnnnnnnnnnnnnnnnnnnnnnnnnnnnnnnnnnnnnnnnnnnnnnnnnnnnnnnnnnnnnnnnnnnnnnnnnnnnnnnnnnnnnnnnnnnnnnnnnnnnnnnnnnnnnnnnnnnnnnnnnnnnnnnnnnnnnnnnnnnnnnnnnnnnnnnnnnnnnnnnnnnnnnnnnnnnnnnnnnnnnnnnnnnnnnnnnnnnnnnnnnnnnnnnnnnnnnnnnnnnnnnnnnnnnnnnnnnnnnnnnnnnnnnnnnnnnnnnnnnnnnnnnnnnnnnnnnnnnnnnnnnnnnnnnnnnnnnnnnnnnnnnnnnnnnnnnnnnnnnnnnnnnnnnnnnnnnnnnnnnnnnnnnnnnnnnnnnnnnnnnnnnnnnnnnnnnnnnnnnnnnnnnnnnnnnnnnnnnnnnnnnnnnnnnnnnnnnnnnnnnnnnnnnnnnnnnnnnnnnnnnnnnnnnnnnnnnnnnnnnnnnnnnnnnnnnnnnnnnnnnnnnnnnnnnnnnnnnnnnnnnnnnnnnnnnnnnnnnnnnnnnnnnnnnnnnnnnnnnnnnnnnnnnnnnnnnnnnnnnnnnnnnnnnnnnnnnnnnnnnnnnnnnnnnnnnnnnnnnnnnnnnnnnnnnnnnnnnnnnnnnnnnnnnnnnnnnnnnnnnnnnnnnnnnnnnnnnnnnnnnnnnnnnnnnnnnnnnnnnnnnnnnnnnnnnnnnnnnnnnnnnnnnnnnnnnnnnnnnnnnnnnnnnnnnnnnnnnnnnnnnnnnnnnnnnnnnnnnnnnnnnnnnnnnnnnnnnnnnnnnnnnnnnnnnnnnnnnnnnnnnnnnnnnnnnnnnnnnnnnnnnnnnnnnnnnnnnnnnnnnnnnnnnnnnnnnnnnnnnnnnnnnnnnnnnnnnnnnnnnnnnnnnnnnnnnnnnnnnnnnnnnnnnnnnnnnnnnnnnnnnnnnnnnnnnnnnnnnnnnnnnnnnnnnnnnnnnnnnnnnnnnnnnnnnnnnnnnnnnnnnnnnnnnnnnnnnnnnnnnnnnnnnnnnnnnnnnnnnnnnnnnnnnnnnnnnnnnnnnnnnnnnnnnnnnnnnnnnnnnnnnnnnnnnnnnnnnnnnnnnnnnnnnnnnnnnnnnnnnnnnnnnnnnnnnnnnnnnnnnnnnnnnnnnnnnnnnnnnnnnnnnnnnnnnnnnnnnnnnnnnnnnnnnnnnnnnnnnnnnnnnnnnnnnnnnnnnnnnnnnnnnnnnnnnnnnnnnnnnnnnnnnnnnnnnnnnnnnnnnnnnnnnnnnnnnnnnnnnnnnnnnnnnnnnnnnnnnnnnnnnnnnnnnnnnnnnnnnnnnnnnnnnnnnnnnnnnnnnnnnnnnnnnnnnnnnnnnnnnnnnnnnnnnnnnnnnnnnnnnnnnnnnnnnnnnnnnnnnnnnnnnnnnnnnnnnnnnnnnnnnnnnnnnnnnnnnnnnnnnnnnnnnnnnnnnnnnnnnnnnnnnnnnnnnnnnnnnnnnnnnnnnnnnnnnnnnnnnnnnnnnnnnnnnnnnnnnnnnnnnnnnnnnnnnnnnnnnnnnnnnnnnnnnnnnnnnnnnnnnnnnnnnnnnnnnnnnnnnnnnnnnnnnnnnnnnnnnnnnnnnnnnnnnnnnnnnnnnnnnnnnnnnnnnnnnnnnnnnnnnnnnnnnnnnnnnnnnnnnnnnnnnnnnnnnnnnnnnnnnnnnnnnnnnnnnnnnnnnnnnnnnnnnnnnnnnnnnnnnnnnnnnnnnnnnnnnnnnnnnnnnnnnnnnnnnnnnnnnnnnnnnnnnnnnnnnnnnnnnnnnnnnnnnnnnnnnnnnnnnnnnnnnnnnnnnnnnnnnnnnnnnnnnnnnnnnnnnnnnnnnnnnnnnnnnnnnnnnnnnnnnnnnnnnnnnnnnnnnnnnnnnnnnnnnnnnnnnnnnnnnnnnnnnnnnnnnnnnnnnnnnnnnnnnnnnnnnnnnnnnnnnnnnnnnnnnnnnnnnnnnnnnnnnnnnnnnnnnnnnnnnnnnnnnnnnnnnnnnnnnnnnnnnnnnnnnnnnnnnnnnnnnnnnnnnnnnnnnnnnnnnnnnnnnnnnnnnnnnnnnnnnnnnnnnnnnnnnnnnnnnnnnnnnnnnnnnnnnnnnnnnnnnnnnnnnnnnnnnnnnnnnnnnnnnnnnnnnnnnnnnnnnnnnnnnnnnnnnnnnnnnnnnnnnnnnnnnnnnnnnnnnnnnnnnnnnnnnnnnnnnnnnnnnnnnnnnnnnnnnnnnnnnnnnnnnnnnnnnnnnnnnnnnnnnnnnnnnnnnnnnnnnnnnnnnnnnnnnnnnnnnnnnnnnnnnnnnnnnnnnnnnnnnnnnnnnnnnnnnnnnnnnnnnnnnnnnnnnnnnnnnnnnnnnnnnnnnnnnnnnnnnnnnnnnnnnnnnnnnnnnnnnnnnnnnnnnnnnnnnnnnnnnnnnnnnnnnnnnnnnnnnnnnnnnnnnnnnnnnnnnnnnnnnnnnnnnnnnnnnnnnnnnnnnnnnnnnnnnnnnnnnnnnnnnnnnnnnnnnnnnnnnnnnnnnnnnnnnnnnnnnnnnnnnnnnnnnnnnnnnnnnnnnnnnnnnnnnnnnnnnnnnnnnnnnnnnnnnnnnnnnnnnnnnnnnnnnnnnnnnnnnnnnnnnnnnnnnnnnnnnnnnnnnnnnnnnnnnnnnnnnnnnnnnnnnnnnnnnnnnnnnnnnnnnnnnnnnnnnnnnnnnnnnnnnnnnnnnnnnnnnnnnnnnnnnnnnnnnnnnnnnnnnnnnnnnnnnnnnnnnnnnnnnnnnnnnnnnnnnnnnnnnnnnnnnnnnnnnnnnnnnnnnnnnnnnnnnnnnnnnnnnnnnnnnnnnnnnnnnnnnnnnnnnnnnnnnnnnnnnnnnnnnnnnnnnnnnnnnnnnnnnnnnnnnnnnnnnnnnnnnnnnnnnnnnnnnnnnnnnnnnnnnnnnnnnnnnnnnnnnnnnnnnnnnnnnnnnnnnnnnnnnnnnnnnnnnnnnnnnnnnnnnnnnnnnnnnnnnnnnnnnnnnnnnnnnnnnnnnnnnnnnnnnnnnnnnnnnnnnnnnnnnnnnnnnnnnnnnnnnnnnnnnnnnnnnnnnnnnnnnnnnnnnnnnnnnnnnnnnnnnnnnnnnnnnnnnnnnnnnnnnnnnnnnnnnnnnnnnnnnnnnnnnnnnnnnnnnnnnnnnnnnnnnnnnnnnnnnnnnnnnnnnnnnnnnnnnnnnnnnnnnnnnnnnnnnnnnnnnnnnnnnnnnnnnnnnnnnnnnnnnnnnnnnnnnnnnnnnnnnnnnnnnnnnnnnnnnnnnnnnnnnnnnnnnnnnnnnnnnnnnnnnnnnnnnnnnnnnnnnnnnnnnnnnnnnnnnnnnnnnnnnnnnnnnnnnnnnnnnnnnnnnnnnnnnnnnnnnnnnnnnnnnnnnnnnnnnnnnnnnnnnnnnnnnnnnnnnnnnnnnnnnnnnnnnnnnnnnnnnnnnnnnnnnnnnnnnnnnnnnnnnnnnnnnnnnnnnnnnnnnnnnnnnnnnnnnnnnnnnnnnnnnnnnnnnnnnnnnnnnnnnnnnnnnnnnnnnnnnnnnnnnnnnnnnnnnnnnnnnnnnnnnnnnnnnnnnnnnnnnnnnnnnnnnnnnnnnnnnnnnnnnnnnnnnnnnnnnnnnnnnnnnnnnnnnnnnnnnnnnnnnnnnnnnnnnnnnnnnnnnnnnnnnnnnnnnnnnnnnnnnnnnnnnnnnnnnnnnnnnnnnnnnnnnnnnnnnnnnnnnnnnnnnnnnnnnnnnnnnnnnnnnnnnnnnnnnnnnnnnnnnnnnnnnnnnnnnnnnnnnnnnnnnnnnnnnnnnnnnnnnnnnnnnnnnnnnnnnnnnnnnnnnnnnnnnnnnnnnnnnnnnnnnnnnnnnnnnnnnnnnnnnnnnnnnnnnnnnnnnnnnnnnnnnnnnnnnnnnnnnnnnnnnnnnnnnnnnnnnnnnnnnnnnnnnnnnnnnnnnnnnnnnnnnnnnnnnnnnnnnnnnnnnnnnnnnnnnnnnnnnnnnnnnnnnnnnnnnnnnnnnnnnnnnnnnnnnnnnnnnnnnnnnnnnnnnnnnnnnnnnnnnnnnnnnnnnnnnnnnnnnnnnnnnnnnnnnnnnnnnnnnnnnnnnnnnnnnnnnnnnnnnnnnnnnnnnnnnnnnnnnnnnnnnnnnnnnnnnnnnnnnnnnnnnnnnnnnnnnnnnnnnnnnnnnnnnnnnnnnnnnnnnnnnnnnnnnnnnnnnnnnnnnnnnnnnnnnnnnnnnnnnnnnnnnnnnnnnnnnnnnnnnnnnnnnnnnnnnnnnnnnnnnnnnnnnnnnnnnnnnnnnnnnnnnnnnnnnnnnnnnnnnnnnnnnnnnnnnnnnnnnnnnnnnnnnnnnnnnnnnnnnnnnnnnnnnnnnnnnnnnnnnnnnnnnnnnnnnnnnnnnnnnnnnnnnnnnnnnnnnnnnnnnnnnnnnnnnnnnnnnnnnnnnnnnnnnnnnnnnnnnnnnnnnnnnnnnnnnnnnnnnnnnnnnnnnnnnnnnnnnnnnnnnnnnnnnnnnnnnnnnnnnnnnnnnnnnnnnnnnnnnnnnnnnnnnnnnnnnnnnnnnnnnnnnnnnnnnnnnnnnnnnnnnnnnnnnnnnnnnnnnnnnnnnnnnnnnnnnnnnnnnnnnnnnnnnnnnnnnnnnnnnnnnnnnnnnnnnnnnnnnnnnnnnnnnnnnnnnnnnnnnnnnnnnnnnnnnnnnnnnnnnnnnnnnnnnnnnnnnnnnnnnnnnnnnnnnnnnnnnnnnnnnnnnnnnnnnnnnnnnnnnnnnnnnnnnnnnnnnnnnnnnnnnnnnnnnnnnnnnnnnnnnnnnnnnnnnnnnnnnnnnnnnnnnnnnnnnnnnnnnnnnnnnnnnnnnnnnnnnnnnnnnnnnnnnnnnnnnnnnnnnnnnnnnnnnnnnnnnnnnnnnnnnnnnnnnnnnnnnnnnnnnnnnnnnnnnnnnnnnnnnnnnnnnnnnnnnnnnnnnnnnnnnnnnnnnnnnnnnnnnnnnnnnnnnnnnnnnnnnnnnnnnnnnnnnnnnnnnnnnnnnnnnnnnnnnnnnnnnnnnnnnnnnnnnnnnnnnnnnnnnnnnnnnnnnnnnnnnnnnnnnnnnnnnnnnnnnnnnnnnnnnnnnnnnnnnnnnnnnnnnnnnnnnnnnnnnnnnnnnnnnnnnnnnnnnnnnnnnnnnnnnnnnnnnnnnnnnnnnnnnnnnnnnnnnnnnnnnnnnnnnnnnnnnnnnnnnnnnnnnnnnnnnnnnnnnnnnnnnnnnnnnnnnnnnnnnnnnnnnnnnnnnnnnnnnnnnnnnnnnnnnnnnnnnnnnnnnnnnnnnnnnnnnnnnnnnnnnnnnnnnnnnnnnnnnnnnnnnnnnnnnnnnnnnnnnnnnnnnnnnnnnnnnnnnnnnnnnnnnnnnnnnnnnnnnnnnnnnnnnnnnnnnnnnnnnnnnnnnnnnnnnnnnnnnnnnnnnnnnnnnnnnnnnnnnnnnnnnnnnnnnnnnnnnnnnnnnnnnnnnnnnnnnnnnnnnnnnnnnnnnnnnnnnnnnnnnnnnnnnnnnnnnnnnnnnnnnnnnnnnnnnnnnnnnnnnnnnnnnnnnnnnnnnnnnnnnnnnnnnnnnnnnnnnnnnnnnnnnnnnnnnnnnnnnnnnnnnnnnnnnnnnnnnnnnnnnnnnnnnnnnnnnnnnnnnnnnnnnnnnnnnnnnnnnnnnnnnnnnnnnnnnnnnnnnnnnnnnnnnnnnnnnnnnnnnnnnnnnnnnnnnnnnnnnnnnnnnnnnnnnnnnnnnnnnnnnnnnnnnnnnnnnnnnnnnnnnnnnnnnnnnnnnnnnnnnnnnnnnnnnnnnnnnnnnnnnnnnnnnnnnnnnnnnnnnnnnnnnnnnnnnnnnnnnnnnnnnnnnnnnnnnnnnnnnnnnnnnnnnnnnnnnnnnnnnnnnnnnnnnnnnnnnnnnnnnnnnnnnnnnnnnnnnnnnnnnnnnnnnnnnnnnnnnnnnnnnnnnnnnnnnnnnnnnnnnnnnnnnnnnnnnnnnnnnnnnnnnnnnnnnnnnnnnnnnnnnnnnnnnnnnnnnnnnnnnnnnnnnnnnnnnnnnnnnnnnnnnnnnnnnnnnnnnnnnnnnnnnnnnnnnnnnnnnnnnnnnnnnnnnnnnnnnnnnnnnnnnnnnnnnnnnnnnnnnnnnnnnnnnnnnnnnnnnnnnnnnnnnnnnnnnnnnnnnnnnnnnnnnnnnnnnnnnnnnnnnnnnnnnnnnnnnnnnnnnnnnnnnnnnnnnnnnnnnnnnnnnnnnnnnnnnnnnnnnnnnnnnnnnnnnnnnnnnnnnnnnnnnnnnnnnnnnnnnnnnnnnnnnnnnnnnnnnnnnnnnnnnnnnnnnnnnnnnnnnnnnnnnnnnnnnnnnnnnnnnnnnnnnnnnnnnnnnnnnnnnnnnnnnnnnnnnnnnnnnnnnnnnnnnnnnnnnnnnnnnnnnnnnnnnnnnnnnnnnnnnnnnnnnnnnnnnnnnnnnnnnnnnnnnnnnnnnnnnnnnnnnnnnnnnnnnnnnnnnnnnnnnnnnnnnnnnnnnnnnnnnnnnnnnnnnnnnnnnnnnnnnnnnnnnnnnnnnnnnnnnnnnnnnnnnnnnnnnnnnnnnnnnnnnnnnnnnnnnnnnnnnnnnnnnnnnnnnnnnnnnnnnnnnnnnnnnnnnnnnnnnnnnnnnnnnnnnnnnnnnnnnnnnnnnnnnnnnnnnnnnnnnnnnnnnnnnnnnnnnnnnnnnnnnnnnnnnnnnnnnnnnnnnnnnnnnnnnnnnnnnnnnnnnnnnnnnnnnnnnnnnnnnnnnnnnnnnnnnnnnnnnnnnnnnnnnnnnnnnnnnnnnnnnnnnnnnnnnnnnnnnnnnnnnnnnnnnnnnnnnnnnnnnnnnnnnnnnnnnnnnnnnnnnnnnnnnnnnnnnnnnnnnnnnnnnnnnnnnnnnnnnnnnnnnnnnnnnnnnnnnnnnnnnnnnnnnnnnnnnnnnnnnnnnnnnnnnnnnnnnnnnnnnnnnnnnnnnnnnnnnnnnnnnnnnnnnnnnnnnnnnnnnnnnnnnnnnnnnnnnnnnnnnnnnnnnnnnnnnnnnnnnnnnnnnnnnnnnnnnnnnnnnnnnnnnnnnnnnnnnnnnnnnnnnnnnnnnnnnnnnnnnnnnnnnnnnnnnnnnnnnnnnnnnnnnnnnnnnnnnnnnnnnnnnnnnnnnnnnnnnnnnnnnnnnnnnnnnnnnnnnnnnnnnnnnnnnnnnnnnnnnnnnnnnnnnnnnnnnnnnnnnnnnnnnnnnnnnnnnnnnnnnnnnnnnnnnnnnnnnnnnnnnnnnnnnnnnnnnnnnnnnnnnnnnnnnnnnnnnnnnnnnnnnnnnnnnnnnnnnnnnnnnnnnnnnnnnnnnnnnnnnnnnnnnnnnnnnnnnnnnnnnnnnnnnnnnnnnnnnnnnnnnnnnnnnnnnnnnnnnnnnnnnnnnnnnnnnnnnnnnnnnnnnnnnnnnnnnnnnnnnnnnnnnnnnnnnnnnnnnnnnnnnnnnnnnnnnnnnnnnnnnnnnnnnnnnnnnnnnnnnnnnnnnnnnnnnnnnnnnnnnnnnnnnnnnnnnnnnnnnnnnnnnnnnnnnnnnnnnnnnnnnnnnnnnnnnnnnnnnnnnnnnnnnnnnnnnnnnnnnnnnnnnnnnnnnnnnnnnnnnnnnnnnnnnnnnnnnnnnnnnnnnnnnnnnnnnnnnnnnnnnnnnnnnnnnnnnnnnnnnnnnnnnnnnnnnnnnnnnnnnnnnnnnnnnnnnnnnnnnnnnnnnnnnnnnnnnnnnnnnnnnnnnnnnnnnnnnnnnnnnnnnnnnnnnnnnnnnnnnnnnnnnnnnnnnnnnnnnnnnnnnnnnnnnnnnnnnnnnnnnnnnnnnnnnnnnnnnnnnnnnnnnnnnnnnnnnnnnnnnnnnnnnnnnnnnnnnnnnnnnnnnnnnnnnnnnnnnnnnnnnnnnnnnnnnnnnnnnnnnnnnnnnnnnnnnnnnnnnnnnnnnnnnnnnnnnnnnnnnnnnnnnnnnnnnnnnnnnnnnnnnnnnnnnnnnnnnnnnnnnnnnnnnnnnnnnnnnnnnnnnnnnnnnnnnnnnnnnnnnnnnnnnnnnnnnnnnnnnnnnnnnnnnnnnnnnnnnnnnnnnnnnnnnnnnnnnnnnnnnnnnnnnnnnnnnnnnnnnnnnnnnnnnnnnnnnnnnnnnnnnnnnnnnnnnnnnnnnnnnnnnnnnnnnnnnnnnnnnnnnnnnnnnnnnnnnnnnnnnnnnnnnnnnnnnnnnnnnnnnnnnnnnnnnnnnnnnnnnnnnnnnnnnnnnnnnnnnnnnnnnnnnnnnnnnnnnnnnnnnnnnnnnnnnnnnnnnnnnnnnnnnnnnnnnnnnnnnnnnnnnnnnnnnnnnnnnnnnnnnnnnnnnnnnnnnnnnnnnnnnnnnnnnnnnnnnnnnnnnnnnnnnnnnnnnnnnnnnnnnnnnnnnnnnnnnnnnnnnnnnnnnnnnnnnnnnnnnnnnnnnnnnnnnnnnnnnnnnnnnnnnnnnnnnnnnnnnnnnnnnnnnnnnnnnnnnnnnnnnnnnnnnnnnnnnnnnnnnnnnnnnnnnnnnnnnnnnnnnnnnnnnnnnnnnnnnnnnnnnnnnnnnnnnnnnnnnnnnnnnnnnnnnnnnnnnnnnnnnnnnnnnnnnnnnnnnnnnnnnnnnnnnnnnnnnnnnnnnnnnnnnnnnnnnnnnnnnnnnnnnnnnnnnnnnnnnnnnnnnnnnnnnnnnnnnnnnnnnnnnnnnnnnnnnnnnnnnnnnnnnnnnnnnnnnnnnnnnnnnnnnnnnnnnnnnnnnnnnnnnnnnnnnnnnnnnnnnnnnnnnnnnnnnnnnnnnnnnnnnnnnnnnnnnnnnnnnnnnnnnnnnnnnnnnnnnnnnnnnnnnnnnnnnnnnnnnnnnnnnnnnnnnnnnnnnnnnnnnnnnnnnnnnnnnnnnnnnnnnnnnnnnnnnnnnnnnnnnnnnnnnnnnnnnnnnnnnnnnnnnnnnnnnnnnnnnnnnnnnnnnnnnnnnnnnnnnnnnnnnnnnnnnnnnnnnnnnnnnnnnnnnnnnnnnnnnnnnnnnnnnnnnnnnnnnnnnnnnnnnnnnnnnnnnnnnnnnnnnnnnnnnnnnnnnnnnnnnnnnnnnnnnnnnnnnnnnnnnnnnnnnnnnnnnnnnnnnnnnnnnnnnnnnnnnnnnnnnnnnnnnnnnnnnnnnnnnnnnnnnnnnnnnnnnnnnnnnnnnnnnnnnnnnnnnnnnnnnnnnnnnnnnnnnnnnnnnnnnnnnnnnnnnnnnnnnnnnnnnnnnnnnnnnnnnnnnnnnnnnnnnnnnnnnnnnnnnnnnnnnnnnnnnnnnnnnnnnnnnnnnnnnnnnnnnnnnnnnnnnnnnnnnnnnnnnnnnnnnnnnnnnnnnnnnnnnnnnnnnnnnnnnnnnnnnnnnnnnnnnnnnnnnnnnnnnnnnnnnnnnnnnnnnnnnnnnnnnnnnnnnnnnnnnnnnnnnnnnnnnnnnnnnnnnnnnnnnnnnnnnnnnnnnnnnnnnnnnnnnnnnnnnnnnnnnnnnnnnnnnnnnnnnnnnnnnnnnnnnnnnnnnnnnnnnnnnnnnnnnnnnnnnnnnnnnnnnnnnnnnnnnnnnnnnnnnnnnnnnnnnnnnnnnnnnnnnnnnnnnnnnnnnnnnnnnnnnnnnnnnnnnnnnnnnnnnnnnnnnnnnnnnnnnnnnnnnnnnnnnnnnnnnnnnnnnnnnnnnnnnnnnnnnnnnnnnnnnnnnnnnnnnnnnnnnnnnnnnnnnnnnnnnnnnnnnnnnnnnnnnnnnnnnnnnnnnnnnnnnnnnnnnnnnnnnnnnnnnnnnnnnnnnnnnnnnnnnnnnnnnnnnnnnnnnnnnnnnnnnnnnnnnnnnnnnnnnnnnnnnnnnnnnnnnnnnnnnnnnnnnnnnnnnnnnnnnnnnnnnnnnnnnnnnnnnnnnnnnnnnnnnnnnnnnnnnnnnnnnnnnnnnnnnnnnnnnnnnnnnnnnnnnnnnnnnnnnnnnnnnnnnnnnnnnnnnnnnnnnnnnnnnnnnnnnnnnnnnnnnnnnnnnnnnnnnnnnnnnnnnnnnnnnnnnnnnnnnnnnnnnnnnnnnnnnnnnnnnnnnnnnnnnnnnnnnnnnnnnnnnnnnnnnnnnnnnnnnnnnnnnnnnnnnnnnnnnnnnnnnnnnnnnnnnnnnnnnnnnnnnnnnnnnnnnnnnnnnnnnnnnnnnnnnnnnnnnnnnnnnnnnnnnnnnnnnnnnnnnnnnnnnnnnnnnnnnnnnnnnnnnnnnnnnnnnnnnnnnnnnnnnnnnnnnnnnnnnnnnnnnnnnnnnnnnnnnnnnnnnnnnnnnnnnnnnnnnnnnnnnnnnnnnnnnnnnnnnnnnnnnnnnnnnnnnnnnnnnnnnnnnnnnnnnnnnnnnnnnnnnnnnnnnnnnnnnnnnnnnnnnnnnnnnnnnnnnnnnnnnnnnnnnnnnnnnnnnnnnnnnnnnnnnnnnnnnnnnnnnnnnnnnnnnnnnnnnnnnnnnnnnnnnnnnnnnnnnnnnnnnnnnnnnnnnnnnnnnnnnnnnnnnnnnnnnnnnnnnnnnnnnnnnnnnnnnnnnnnnnnnnnnnnnnnnnnnnnnnnnnnnnnnnnnnnnnnnnnnnnnnnnnnnnnnnnnnnnnnnnnnnnnnnnnnnnnnnnnnnnnnnnnnnnnnnnnnnnnnnnnnnnnnnnnnnnnnnnnnnnnnnnnnnnnnnnnnnnnnnnnnnnnnnnnnnnnnnnnnnnnnnnnnnnnnnnnnnnnnnnnnnnnnnnnnnnnnnnnnnnnnnnnnnnnnnnnnnnnnnnnnnnnnnnnnnnnnnnnnnnnnnnnnnnnnnnnnnnnnnnnnnnnnnnnnnnnnnnnnnnnnnnnnnnnnnnnnnnnnnnnnnnnnnnnnnnnnnnnnnnnnnnnnnnnnnnnnnnnnnnnnnnnnnnnnnnnnnnnnnnnnnnnnnnnnnnnnnnnnnnnnnnnnnnnnnnnnnnnnnnnnnnnnnnnnnnnnnnnnnnnnnnnnnnnnnnnnnnnnnnnnnnnnnnnnnnnnnnnnnnnnnnnnnnnnnnnnnnnnnnnnnnnnnnnnnnnnnnnnnnnnnnnnnnnnnnnnnnnnnnnnnnnnnnnnnnnnnnnnnnnnnnnnnnnnnnnnnnnnnnnnnnnnnnnnnnnnnnnnnnnnnnnnnnnnnnnnnnnnnnnnnnnnnnnnnnnnnnnnnnnnnnnnnnnnnnnnnnnnnnnnnnnnnnnnnnnnnnnnnnnnnnnnnnnnnnnnnnnnnnnnnnnnnnnnnnnnnnnnnnnnnnnnnnnnnnnnnnnnnnnnnnnnnnnnnnnnnnnnnnnnnnnnnnnnnnnnnnnnnnnnnnnnnnnnnnnnnnnnnnnnnnnnnnnnnnnnnnnnnnnnnnnnnnnnnnnnnnnnnnnnnnnnnnnnnnnnnnnnnnnnnnnnnnnnnnnnnnnnnnnnnnnnnnnnnnnnnnnnnnnnnnnnnnnnnnnnnnnnnnnnnnnnnnnnnnnnnnnnnnnnnnnnnnnnnnnnnnnnnnnnnnnnnnnnnnnnnnnnnnnnnnnnnnnnnnnnnnnnnnnnnnnnnnnnnnnnnnnnnnnnnnnnnnnnnnnnnnnnnnnnnnnnnnnnnnnnnnnnnnnnnnnnnnnnnnnnnnnnnnnnnnnnnnnnnnnnnnnnnnnnnnnnnnnnnnnnnnnnnnnnnnnnnnnnnnnnnnnnnnnnnnnnnnnnnnnnnnnnnnnnnnnnnnnnnnnnnnnnnnnnnnnnnnnnnnnnnnnnnnnnnnnnnnnnnnnnnnnnnnnnnnnnnnnnnnnnnnnnnnnnnnnnnnnnnnnnnnnnnnnnnnnnnnnnnnnnnnnnnnnnnnnnnnnnnnnnnnnnnnnnnnnnnnnnnnnnnnnnnnnnnnnnnnnnnnnnnnnnnnnnnnnnnnnnnnnnnnnnnnnnnnnnnnnnnnnnnnnnnnnnnnnnnnnnnnnnnnnnnnnnnnnnnnnnnnnnnnnnnnnnnnnnnnnnnnnnnnnnnnnnnnnnnnnnnnnnnnnnnnnnnnnnnnnnnnnnnnnnnnnnnnnnnnnnnnnnnnnnnnnnnnnnnnnnnnnnnnnnnnnnnnnnnnnnnnnnnnnnnnnnnnnnnnnnnnnnnnnnnnnnnnnnnnnnnnnnnnnnnnnnnnnnnnnnnnnnnnnnnnnnnnnnnnnnnnnnnnnnnnnnnnnnnnnnnnnnnnnnnnnnnnnnnnnnnnnnnnnnnnnnnnnnnnnnnnnnnnnnnnnnnnnnnnnnnnnnnnnnnnnnnnnnnnnnnnnnnnnnnnnnnnnnnnnnnnnnnnnnnnnnnnnnnnnnnnnnnnnnnnnnnnnnnnnnnnnnnnnnnnnnnnnnnnnnnnnnnnnnnnnnnnnnnnnnnnnnnnnnnnnnnnnnnnnnnnnnnnnnnnnnnnnnnnnnnnnnnnnnnnnnnnnnnnnnnnnnnnnnnnnnnnnnnnnnnnnnnnnnnnnnnnnnnnnnnnnnnnnnnnnnnnnnnnnnnnnnnnnnnnnnnnnnnnnnnnnnnnnnnnnnnnnnnnnnnnnnnnnnnnnnnnnnnnnnnnnnnnnnnnnnnnnnnnnnnnnnnnnnnnnnnnnnnnnnnnnnnnnnnnnnnnnnnnnnnnnnnnnnnnnnnnnnnnnnnnnnnnnnnnnnnnnnnnnnnnnnnnnnnnnnnnnnnnnnnnnnnnnnnnnnnnnnnnnnnnnnnnnnnnnnnnnnnnnnnnnnnnnnnnnnnnnnnnnnnnnnnnnnnnnnnnnnnnnnnnnnnnnnnnnnnnnnnnnnnnnnnnnnnnnnnnnnnnnnnnnnnnnnnnnnnnnnnnnnnnnnnnnnnnnnnnnnnnnnnnnnnnnnnnnnnnnnnnnnnnnnnnnnnnnnnnnnnnnnnnnnnnnnnnnnnnnnnnnnnnnnnnnnnnnnnnnnnnnnnnnnnnnnnnnnnnnnnnnnnnnnnnnnnnnnnnnnnnnnnnnnnnnnnnnnnnnnnnnnnnnnnnnnnnnnnnnnnnnnnnnnnnnnnnnnnnnnnnnnnnnnnnnnnnnnnnnnnnnnnnnnnnnnnnnnnnnnnnnnnnnnnnnnnnnnnnnnnnnnnnnnnnnnnnnnnnnnnnnnnnnnnnnnnnnnnnnnnnnnnnnnnnnnnnnnnnnnnnnnnnnnnnnnnnnnnnnnnnnnnnnnnnnnnnnnnnnnnnnnnnnnnnnnnnnnnnnnnnnnnnnnnnnnnnnnnnnnnnnnnnnnnnnnnnnnnnnnnnnnnnnnnnnnnnnnnnnnnnnnnnnnnnnnnnnnnnnnnnnnnnnnnnnnnnnnnnnnnnnnnnnnnnnnnnnnnnnnnnnnnnnnnnnnnnnnnnnnnnnnnnnnnnnnnnnnnnnnnnnnnnnnnnnnnnnnnnnnnnnnnnnnnnnnnnnnnnnnnnnnnnnnnnnnnnnnnnnnnnnnnnnnnnnnnnnnnnnnnnnnnnnnnnnnnnnnnnnnnnnnnnnnnnnnnnnnnnnnnnnnnnnnnnnnnnnnnnnnnnnnnnnnnnnnnnnnnnnnnnnnnnnnnnnnnnnnnnnnnnnnnnnnnnnnnnnnnnnnnnnnnnnnnnnnnnnnnnnnnnnnnnnnnnnnnnnnnnnnnnnnnnnnnnnnnnnnnnnnnnnnnnnnnnnnnnnnnnnnnnnnnnnnnnnnnnnnnnnnnnnnnnnnnnnnnnnnnnnnnnnnnnnnnnnnnnnnnnnnnnnnnnnnnnnnnnnnnnnnnnnnnnnnnnnnnnnnnnnnnnnnnnnnnnnnnnnnnnnnnnnnnnnnnnnnnnnnnnnnnnnnnnnnnnnnnnnnnnnnnnnnnnnnnnnnnnnnnnnnnnnnnnnnnnnnnnnnnnnnnnnnnnnnnnnnnnnnnnnnnnnnnnnnnnnnnnnnnnnnnnnnnnnnnnnnnnnnnnnnnnnnnnnnnnnnnnnnnnnnnnnnnnnnnnnnnnnnnnnnnnnnnnnnnnnnnnnnnnnnnnnnnnnnnnnnnnnnnnnnnnnnnnnnnnnnnnnnnnnnnnnnnnnnnnnnnnnnnnnnnnnnnnnnnnnnnnnnnnnnnnnnnnnnnnnnnnnnnnnnnnnnnnnnnnnnnnnnnnnnnnnnnnnnnnnnnnnnnnnnnnnnnnnnnnnnnnnnnnnnnnnnnnnnnnnnnnnnnnnnnnnnnnnnnnnnnnnnnnnnnnnnnnnnnnnnnnnnnnnnnnnnnnnnnnnnnnnnnnnnnnnnnnnnnnnnnnnnnnnnnnnnnnnnnnnnnnnnnnnnnnnnnnnnnnnnnnnnnnnnnnnnnnnnnnnnnnnnnnnnnnnnnnnnnnnnnnnnnnnnnnnnnnnnnnnnnnnnnnnnnnnnnnnnnnnnnnnnnnnnnnnnnnnnnnnnnnnnnnnnnnnnnnnnnnnnnnnnnnnnnnnnnnnnnnnnnnnnnnnnnnnnnnnnnnnnnnnnnnnnnnnnnnnnnnnnnnnnnnnnnnnnnnnnnnnnnnnnnnnnnnnnnnnnnnnnnnnnnnnnnnnnnnnnnnnnnnnnnnnnnnnnnnnnnnnnnnnnnnnnnnnnnnnnnnnnnnnnnnnnnnnnnnnnnnnnnnnnnnnnnnnnnnnnnnnnnnnnnnnnnnnnnnnnnnnnnnnnnnnnnnnnnnnnnnnnnnnnnnnnnnnnnnnnnnnnnnnnnnnnnnnnnnnnnnnnnnnnnnnnnnnnnnnnnnnnnnnnnnnnnnnnnnnnnnnnnnnnnnnnnnnnnnnnnnnnnnnnnnnnnnnnnnnnnnnnnnnnnnnnnnnnnnnnnnnnnnnnnnnnnnnnnnnnnnnnnnnnnnnnnnnnnnnnnnnnnnnnnnnnnnnnnnnnnnnnnnnnnnnnnnnnnnnnnnnnnnnnnnnnnnnnnnnnnnnnnnnnnnnnnnnnnnnnnnnnnnnnnnnnnnnnnnnnnnnnnnnnnnnnnnnnnnnnnnnnnnnnnnnnnnnnnnnnnnnnnnnnnnnnnnnnnnnnnnnnnnnnnnnnnnnnnnnnnnnnnnnnnnnnnnnnnnnnnnnnnnnnnnnnnnnnnnnnnnnnnnnnnnnnnnnnnnnnnnnnnnnnnnnnnnnnnnnnnnnnnnnnnnnnnnnnnnnnnnnnnnnnnnnnnnnnnnnnnnnnnnnnnnnnnnnnnnnnnnnnnnnnnnnnnnnnnnnnnnnnnnnnnnnnnnnnnnnnnnnnnnnnnnnnnnnnnnnnnnnnnnnnnnnnnnnnnnnnnnnnnnnnnnnnnnnnnnnnnnnnnnnnnnnnnnnnnnnnnnnnnnnnnnnnnnnnnnnnnnnnnnnnnnnnnnnnnnnnnnnnnnnnnnnnnnnnnnnnnnnnnnnnnnnnnnnnnnnnnnnnnnnnnnnnnnnnnnnnnnnnnnnnnnnnnnnnnnnnnnnnnnnnnnnnnnnnnnnnnnnnnnnnnnnnnnnnnnnnnnnnnnnnnnnnnnnnnnnnnnnnnnnnnnnnnnnnnnnnnnnnnnnnnnnnnnnnnnnnnnnnnnnnnnnnnnnnnnnnnnnnnnnnnnnnnnnnnnnnnnnnnnnnnnnnnnnnnnnnnnnnnnnnnnnnnnnnnnnnnnnnnnnnnnnnnnnnnnnnnnnnnnnnnnnnnnnnnnnnnnnnnnnnnnnnnnnnnnnnnnnnnnnnnnnnnnnnnnnnnnnnnnnnnnnnnnnnnnnnnnnnnnnnnnnnnnnnnnnnnnnnnnnnnnnnnnnnnnnnnnnnnnnnnnnnnnnnnnnnnnnnnnnnnnnnnnnnnnnnnnnnnnnnnnnnnnnnnnnnnnnnnnnnnnnnnnnnnnnnnnnnnnnnnnnnnnnnnnnnnnnnnnnnnnnnnnnnnnnnnnnnnnnnnnnnnnnnnnnnnnnnnnnnnnnnnnnnnnnnnnnnnnnnnnnnnnnnnnnnnnnnnnnnnnnnnnnnnnnnnnnnnnnnnnnnnnnnnnnnnnnnnnnnnnnnnnnnnnnnnnnnnnnnnnnnnnnnnnnnnnnnnnnnnnnnnnnnnnnnnnnnnnnnnnnnnnnnnnnnnnnnnnnnnnnnnnnnnnnnnnnnnnnnnnnnnnnnnnnnnnnnnnnnnnnnnnnnnnnnnnnnnnnnnnnnnnnnnnnnnnnnnnnnnnnnnnnnnnnnnnnnnnnnnnnnnnnnnnnnnnnnnnnnnnnnnnnnnnnnnnnnnnnnnnnnnnnnnnnnnnnnnnnnnnnnnnnnnnnnnnnnnnnnnnnnnnnnnnnnnnnnnnnnnnnnnnnnnnnnnnnnnnnnnnnnnnnnnnnnnnnnnnnnnnnnnnnnnnnnnnnnnnnnnnnnnnnnnnnnnnnnnnnnnnnnnnnnnnnnnnnnnnnnnnnnnnnnnnnnnnnnnnnnnnnnnnnnnnnnnnnnnnnnnnnnnnnnnnnnnnnnnnnnnnnnnnnnnnnnnnnnnnnnnnnnnnnnnnnnnnnnnnnnnnnnnnnnnnnnnnnnnnnnnnnnnnnnnnnnnnnnnnnnnnnnnnnnnnnnnnnnnnnnnnnnnnnnnnnnnnnnnnnnnnnnnnnnnnnnnnnnnnnnnnnnnnnnnnnnnnnnnnnnnnnnnnnnnnnnnnnnnnnnnnnnnnnnnnnnnnnnnnnnnnnnnnnnnnnnnnnnnnnnnnnnnnnnnnnnnnnnnnnnnnnnnnnnnnnnnnnnnnnnnnnnnnnnnnnnnnnnnnnnnnnnnnnnnnnnnnnnnnnnnnnnnnnnnnnnnnnnnnnnnnnnnnnnnnnnnnnnnnnnnnnnnnnnnnnnnnnnnnnnnnnnnnnnnnnnnnnnnnnnnnnnnnnnnnnnnnnnnnnnnnnnnnnnnnnnnnnnnnnnnnnnnnnnnnnnnnnnnnnnnnnnnnnnnnnnnnnnnnnnnnnnnnnnnnnnnnnnnnnnnnnnnnnnnnnnnnnnnnnnnnnnnnnnnnnnnnnnnnnnnnnnnnnnnnnnnnnnnnnnnnnnnnnnnnnnnnnnnnnnnnnnnnnnnnnnnnnnnnnnnnnnnnnnnnnnnnnnnnnnnnnnnnnnnnnnnnnnnnnnnnnnnnnnnnnnnnnnnnnnnnnnnnnnnnnnnnnnnnnnnnnnnnnnnnnnnnnnnnnnnnnnnnnnnnnnnnnnnnnnnnnnnnnnnnnnnnnnnnnnnnnnnnnnnnnnnnnnnnnnnnnnnnnnnnnnnnnnnnnnnnnnnnnnnnnnnnnnnnnnnnnnnnnnnnnnnnnnnnnnnnnnnnnnnnnnnnnnnnnnnnnnnnnnnnnnnnnnnnnnnnnnnnnnnnnnnnnnnnnnnnnnnnnnnnnnnnnnnnnnnnnnnnnnnnnnnnnnnnnnnnnnnnnnnnnnnnnnnnnnnnnnnnnnnnnnnnnnnnnnnnnnnnnnnnnnnnnnnnnnnnnnnnnnnnnnnnnnnnnnnnnnnnnnnnnnnnnnnnnnnnnnnnnnnnnnnnnnnnnnnnnnnnnnnnnnnnnnnnnnnnnnnnnnnnnnnnnnnnnnnnnnnnnnnnnnnnnnnnnnnnnnnnnnnnnnnnnnnnnnnnnnnnnnnnnnnnnnnnnnnnnnnnnnnnnnnnnnnnnnnnnnnnnnnnnnnnnnnnnnnnnnnnnnnnnnnnnnnnnnnnnnnnnnnnnnnnnnnnnnnnnnnnnnnnnnnnnnnnnnnnnnnnnnnnnnnnnnnnnnnnnnnnnnnnnnnnnnnnnnnnnnnnnnnnnnnnnnnnnnnnnnnnnnnnnnnnnnnnnnnnnnnnnnnnnnnnnnnnnnnnnnnnnnnnnnnnnnnnnnnnnnnnnnnnnnnnnnnnnnnnnnnnnnnnnnnnnnnnnnnnnnnnnnnnnnnnnnnnnnnnnnnnnnnnnnnnnnnnnnnnnnnnnnnnnnnnnnnnnnnnnnnnnnnnnnnnnnnnnnnnnnnnnnnnnnnnnnnnnnnnnnnnnnnnnnnnnnnnnnnnnnnnnnnnnnnnnnnnnnnnnnnnnnnnnnnnnnnnnnnnnnnnnnnnnnnnnnnnnnnnnnnnnnnnnnnnnnnnnnnnnnnnnnnnnnnnnnnnnnnnnnnnnnnnnnnnnnnnnnnnnnnnnnnnnnnnnnnnnnnnnnnnnnnnnnnnnnnnnnnnnnnnnnnnnnnnnnnnnnnnnnnnnnnnnnnnnnnnnnnnnnnnnnnnnnnnnnnnnnnnnnnnnnnnnnnnnnnnnnnnnnnnnnnnnnnnnnnnnnnnnnnnnnnnnnnnnnnnnnnnnnnnnnnnnnnnnnnnnnnnnnnnnnnnnnnnnnnnnnnnnnnnnnnnnnnnnnnnnnnnnnnnnnnnnnnnnnnnnnnnnnnnnnnnnnnnnnnnnnnnnnnnnnnnnnnnnnnnnnnnnnnnnnnnnnnnnnnnnnnnnnnnnnnnnnnnnnnnnnnnnnnnnnnnnnnnnnnnnnnnnnnnnnnnnnnnnnnnnnnnnnnnnnnnnnnnnnnnnnnnnnnnnnnnnnnnnnnnnnnnnnnnnnnnnnnnnnnnnnnnnnnnnnnnnnnnnnnnnnnnnnnnnnnnnnnnnnnnnnnnnnnnnnnnnnnnnnnnnnnnnnnnnnnnnnnnnnnnnnnnnnnnnnnnnnnnnnnnnnnnnnnnnnnnnnnnnnnnnnnnnnnnnnnnnnnnnnnnnnnnnnnnnnnnnnnnnnnnnnnnnnnnnnnnnnnnnnnnnnnnnnnnnnnnnnnnnnnnnnnnnnnnnnnnnnnnnnnnnnnnnnnnnnnnnnnnnnnnnnnnnnnnnnnnnnnnnnnnnnnnnnnnnnnnnnnnnnnnnnnnnnnnnnnnnnnnnnnnnnnnnnnnnnnnnnnnnnnnnnnnnnnnnnnnnnnnnnnnnnnnnnnnnnnnnnnnnnnnnnnnnnnnnnnnnnnnnnnnnnnnnnnnnnnnnnnnnnnnnnnnnnnnnnnnnnnnnnnnnnnnnnnnnnnnnnnnnnnnnnnnnnnnnnnnnnnnnnnnnnnnnnnnnnnnnnnnnnnnnnnnnnnnnnnnnnnnnnnnnnnnnnnnnnnnnnnnnnnnnnnnnnnnnnnnnnnnnnnnnnnnnnnnnnnnnnnnnnnnnnnnnnnnnnnnnnnnnnnnnnnnnnnnnnnnnnnnnnnnnnnnnnnnnnnnnnnnnnnnnnnnnnnnnnnnnnnnnnnnnnnnnnnnnnnnnnnnnnnnnnnnnnnnnnnnnnnnnnnnnnnnnnnnnnnnnnnnnnnnnnnnnnnnnnnnnnnnnnnnnnnnnnnnnnnnnnnnnnnnnnnnnnnnnnnnnnnnnnnnnnnnnnnnnnnnnnnnnnnnnnnnnnnnnnnnnnnnnnnnnnnnnnnnnnnnnnnnnnnnnnnnnnnnnnnnnnnnnnnnnnnnnnnnnnnnnnnnnnnnnnnnnnnnnnnnnnnnnnnnnnnnnnnnnnnnnnnnnnnnnnnnnnnnnnnnnnnnnnnnnnnnnnnnnnnnnnnnnnnnnnnnnnnnnnnnnnnnnnnnnnnnnnnnnnnnnnnnnnnnnnnnnnnnnnnnnnnnnnnnnnnnnnnnnnnnnnnnnnnnnnnnnnnnnnnnnnnnnnnnnnnnnnnnnnnnnnnnnnnnnnnnnnnnnnnnnnnnnnnnnnnnnnnnnnnnnnnnnnnnnnnnnnnnnnnnnnnnnnnnnnnnnnnnnnnnnnnnnnnnnnnnnnnnnnnnnnnnnnnnnnnnnnnnnnnnnnnnnnnnnnnnnnnnnnnnnnnnnnnnnnnnnnnnnnnnnnnnnnnnnnnnnnnnnnnnnnnnnnnnnnnnnnnnnnnnnnnnnnnnnnnnnnnnnnnnnnnnnnnnnnnnnnnnnnnnnnnnnnnnnnnnnnnnnnnnnnnnnnnnnnnnnnnnnnnnnnnnnnnnnnnnnnnnnnnnnnnnnnnnnnnnnnnnnnnnnnnnnnnnnnnnnnnnnnnnnnnnnnnnnnnnnnnnnnnnnnnnnnnnnnnnnnnnnnnnnnnnnnnnnnnnnnnnnnnnnnnnnnnnnnnnnnnnnnnnnnnnnnnnnnnnnnnnnnnnnnnnnnnnnnnnnnnnnnnnnnnnnnnnnnnnnnnnnnnnnnnnnnnnnnnnnnnnnnnnnnnnnnnnnnnnnnnnnnnnnnnnnnnnnnnnnnnnnnnnnnnnnnnnnnnnnnnnnnnnnnnnnnnnnnnnnnnnnnnnnnnnnnnnnnnnnnnnnnnnnnnnnnnnnnnnnnnnnnnnnnnnnnnnnnnnnnnnnnnnnnnnnnnnnnnnnnnnnnnnnnnnnnnnnnnnnnnnnnnnnnnnnnnnnnnnnnnnnnnnnnnnnnnnnnnnnnnnnnnnnnnnnnnnnnnnnnnnnnnnnnnnnnnnnnnnnnnnnnnnnnnnnnnnnnnnnnnnnnnnnnnnnnnnnnnnnnnnnnnnnnnnnnnnnnnnnnnnnnnnnnnnnnnnnnnnnnnnnnnnnnnnnnnnnnnnnnnnnnnnnnnnnnnnnnnnnnnnnnnnnnnnnnnnnnnnnnnnnnnnnnnnnnnnnnnnnnnnnnnnnnnnnnnnnnnnnnnnnnnnnnnnnnnnnnnnnnnnnnnnnnnnnnnnnnnnnnnnnnnnnnnnnnnnnnnnnnnnnnnnnnnnnnnnnnnnnnnnnnnnnnnnnnnnnnnnnnnnnnnnnnnnnnnnnnnnnnnnnnnnnnnnnnnnnnnnnnnnnnnnnnnnnnnnnnnnnnnnnnnnnnnnnnnnnnnnnnnnnnnnnnnnnnnnnnnnnnnnnnnnnnnnnnnnnnnnnnnnnnnnnnnnnnnnnnnnnnnnnnnnnnnnnnnnnnnnnnnnnnnnnnnnnnnnnnnnnnnnnnnnnnnnnnnnnnnnnnnnnnnnnnnnnnnnnnnnnnnnnnnnnnnnnnnnnnnnnnnnnnnnnnnnnnnnnnnnnnnnnnnnnnnnnnnnnnnnnnnnnnnnnnnnnnnnnnnnnnnnnnnnnnnnnnnnnnnnnnnnnnnnnnnnnnnnnnnnnnnnnnnnnnnnnnnnnnnnnnnnnnnnnnnnnnnnnnnnnnnnnnnnnnnnnnnnnnnnnnnnnnnnnnnnnnnnnnnnnnnnnnnnnnnnnnnnnnnnnnnnnnnnnnnnnnnnnnnnnnnnnnnnnnnnnnnnnnnnnnnnnnnnnnnnnnnnnnnnnnnnnnnnnnnnnnnnnnnnnnnnnnnnnnnnnnnnnnnnnnnnnnnnnnnnnnnnnnnnnnnnnnnnnnnnnnnnnnnnnnnnnnnnnnnnnnnnnnnnnnnnnnnnnnnnnnnnnnnnnnnnnnnnnnnnnnnnnnnnnnnnnnnnnnnnnnnnnnnnnnnnnnnnnnnnnnnnnnnnnnnnnnnnnnnnnnnnnnnnnnnnnnnnnnnnnnnnnnnnnnnnnnnnnnnnnnnnnnnnnnnnnnnnnnnnnnnnnnnnnnnnnnnnnnnnnnnnnnnnnnnnnnnnnnnnnnnnnnnnnnnnnnnnnnnnnnnnnnnnnnnnnnnnnnnnnnnnnnnnnnnnnnnnnnnnnnnnnnnnnnnnnnnnnnnnnnnnnnnnnnnnnnnnnnnnnnnnnnnnnnnnnnnnnnnnnnnnnnnnnnnnnnnnnnnnnnnnnnnnnnnnnnnnnnnnnnnnnnnnnnnnnnnnnnnnnnnnnnnnnnnnnnnnnnnnnnnnnnnnnnnnnnnnnnnnnnnnnnnnnnnnnnnnnnnnnnnnnnnnnnnnnnnnnnnnnnnnnnnnnnnnnnnnnnnnnnnnnnnnnnnnnnnnnnnnnnnnnnnnnnnnnnnnnnnnnnnnnnnnnnnnnnnnnnnnnnnnnnnnnnnnnnnnnnnnnnnnnnnnnnnnnnnnnnnnnnnnnnnnnnnnnnnnnnnnnnnnnnnnnnnnnnnnnnnnnnnnnnnnnnnnnnnnnnnnnnnnnnnnnnnnnnnnnnnnnnnnnnnnnnnnnnnnnnnnnnnnnnnnnnnnnnnnnnnnnnnnnnnnnnnnnnnnnnnnnnnnnnnnnnnnnnnnnnnnnnnnnnnnnnnnnnnnnnnnnnnnnnnnnnnnnnnnnnnnnnnnnnnnnnnnnnnnnnnnnnnnnnnnnnnnnnnnnnnnnnnnnnnnnnnnnnnnnnnnnnnnnnnnnnnnnnnnnnnnnnnnnnnnnnnnnnnnnnnnnnnnnnnnnnnnnnnnnnnnnnnnnnnnnnnnnnnnnnnnnnnnnnnnnnnnnnnnnnnnnnnnnnnnnnnnnnnnnnnnnnnnnnnnnnnnnnnnnnnnnnnnnnnnnnnnnnnnnnnnnnnnnnnnnnnnnnnnnnnnnnnnnnnnnnnnnnnnnnnnnnnnnnnnnnnnnnnnnnnnnnnnnnnnnnnnnnnnnnnnnnnnnnnnnnnnnnnnnnnnnnnnnnnnnnnnnnnnnnnnnnnnnnnnnnnnnnnnnnnnnnnnnnnnnnnnnnnnnnnnnnnnnnnnnnnnnnnnnnnnnnnnnnnnnnnnnnnnnnnnnnnnnnnnnnnnnnnnnnnnnnnnnnnnnnnnnnnnnnnnnnnnnnnnnnnnnnnnnnnnnnnnnnnnnnnnnnnnnnnnnnnnnnnnnnnnnnnnnnnnnnnnnnnnnnnnnnnnnnnnnnnnnnnnnnnnnnnnnnnnnnnnnnnnnnnnnnnnnnnnnnnnnnnnnnnnnnnnnnnnnnnnnnnnnnnnnnnnnnnnnnnnnnnnnnnnnnnnnnnnnnnnnnnnnnnnnnnnnnnnnnnnnnnnnnnnnnnnnnnnnnnnnnnnnnnnnnnnnnnnnnnnnnnnnnnnnnnnnnnnnnnnnnnnnnnnnnnnnnnnnnnnnnnnnnnnnnnnnnnnnnnnnnnnnnnnnnnnnnnnnnnnnnnnnnnnnnnnnnnnnnnnnnnnnnnnnnnnnnnnnnnnnnnnnnnnnnnnnnnnnnnnnnnnnnnnnnnnnnnnnnnnnnnnnnnnnnnnnnnnnnnnnnnnnnnnnnnnnnnnnnnnnnnnnnnnnnnnnnnnnnnnnnnnnnnnnnnnnnnnnnnnnnnnnnnnnnnnnnnnnnnnnnnnnnnnnnnnnnnnnnnnnnnnnnnnnnnnnnnnnnnnnnnnnnnnnnnnnnnnnnnnnnnnnnnnnnnnnnnnnnnnnnnnnnnnnnnnnnnnnnnnnnnnnnnnnnnnnnnnnnnnnnnnnnnnnnnnnnnnnnnnnnnnnnnnnnnnnnnnnnnnnnnnnnnnnnnnnnnnnnnnnnnnnnnnnnnnnnnnnnnnnnnnnnnnnnnnnnnnnnnnnnnnnnnnnnnnnnnnnnnnnnnnnnnnnnnnnnnnnnnnnnnnnnnnnnnnnnnnnnnnnnnnnnnnnnnnnnnnnnnnnnnnnnnnnnnnnnnnnnnnnnnnnnnnnnnnnnnnnnnnnnnnnnnnnnnnnnnnnnnnnnnnnnnnnnnnnnnnnnnnnnnnnnnnnnnnnnnnnnnnnnnnnnnnnnnnnnnnnnnnnnnnnnnnnnnnnnnnnnnnnnnnnnnnnnnnnnnnnnnnnnnnnnnnnnnnnnnnnnnnnnnnnnnnnnnnnnnnnnnnnnnnnnnnnnnnnnnnnnnnnnnnnnnnnnnnnnnnnnnnnnnnnnnnnnnnnnnnnnnnnnnnnnnnnnnnnnnnnnnnnnnnnnnnnnnnnnnnnnnnnnnnnnnnnnnnnnnnnnnnnnnnnnnnnnnnnnnnnnnnnnnnnnnnnnnnnnnnnnnnnnnnnnnnnnnnnnnnnnnnnnnnnnnnnnnnnnnnnnnnnnnnnnnnnnnnnnnnnnnnnnnnnnnnnnnnnnnnnnnnnnnnnnnnnnnnnnnnnnnnnnnnnnnnnnnnnnnnnnnnnnnnnnnnnnnnnnnnnnnnnnnnnnnnnnnnnnnnnnnnnnnnnnnnnnnnnnnnnnnnnnnnnnnnnnnnnnnnnnnnnnnnnnnnnnnnnnnnnnnnnnnnnnnnnnnnnnnnnnnnnnnnnnnnnnnnnnnnnnnnnnnnnnnnnnnnnnnnnnnnnnnnnnnnnnnnnnnnnnnnnnnnnnnnnnnnnnnnnnnnnnnnnnnnnnnnnnnnnnnnnnnnnnnnnnnnnnnnnnnnnnnnnnnnnnnnnnnnnnnnnnnnnnnnnnnnnnnnnnnnnnnnnnnnnnnnnnnnnnnnnnnnnnnnnnnnnnnnnnnnnnnnnnnnnnnnnnnnnnnnnnnnnnnnnnnnnnnnnnnnnnnnnnnnnnnnnnnnnnnnnnnnnnnnnnnnnnnnnnnnnnnnnnnnnnnnnnnnnnnnnnnnnnnnnnnnnnnnnnnnnnnnnnnnnnnnnnnnnnnnnnnnnnnnnnnnnnnnnnnnnnnnnnnnnnnnnnnnnnnnnnnnnnnnnnnnnnnnnnnnnnnnnnnnnnnnnnnnnnnnnnnnnnnnnnnnnnnnnnnnnnnnnnnnnnnnnnnnnnnnnnnnnnnnnnnnnnnnnnnnnnnnnnnnnnnnnnnnnnnnnnnnnnnnnnnnnnnnnnnnnnnnnnnnnnnnnnnnnnnnnnnnnnnnnnnnnnnnnnnnnnnnnnnnnnnnnnnnnnnnnnnnnnnnnnnnnnnnnnnnnnnnnnnnnnnnnnnnnnnnnnnnnnnnnnnnnnnnnnnnnnnnnnnnnnnnnnnnnnnnnnnnnnnnnnnnnnnnnnnnnnnnnnnnnnnnnnnnnnnnnnnnnnnnnnnnnnnnnnnnnnnnnnnnnnnnnnnnnnnnnnnnnnnnnnnnnnnnnnnnnnnnnnnnnnnnnnnnnnnnnnnnnnnnnnnnnnnnnnnnnnnnnnnnnnnnnnnnnnnnnnnnnnnnnnnnnnnnnnnnnnnnnnnnnnnnnnnnnnnnnnnnnnnnnnnnnnnnnnnnnnnnnnnnnnnnnnnnnnnnnnnnnnnnnnnnnnnnnnnnnnnnnnnnnnnnnnnnnnnnnnnnnnnnnnnnnnnnnnnnnnnnnnnnnnnnnnnnnnnnnnnnnnnnnnnnnnnnnnnnnnnnnnnnnnnnnnnnnnnnnnnnnnnnnnnnnnnnnnnnnnnnnnnnnnnnnnnnnnnnnnnnnnnnnnnnnnnnnnnnnnnnnnnnnnnnnnnnnnnnnnnnnnnnnnnnnnnnnnnnnnnnnnnnnnnnnnnnnnnnnnnnnnnnnnnnnnnnnnnnnnnnnnnnnnnnnnnnnnnnnnnnnnnnnnnnnnnnnnnnnnnnnnnnnnnnnnnnnnnnnnnnnnnnnnnnnnnnnnnnnnnnnnnnnnnnnnnnnnnnnnnnnnnnnnnnnnnnnnnnnnnnnnnnnnnnnnnnnnnnnnnnnnnnnnnnnnnnnnnnnnnnnnnnnnnnnnnnnnnnnnnnnnnnnnnnnnnnnnnnnnnnnnnnnnnnnnnnnnnnnnnnnnnnnnnnnnnnnnnnnnnnnnnnnnnnnnnnnnnnnnnnnnnnnnnnnnnnnnnnnnnnnnnnnnnnnnnnnnnnnnnnnnnnnnnnnnnnnnnnnnnnnnnnnnnnnnnnnnnnnnnnnnnnnnnnnnnnnnnnnnnnnnnnnnnnnnnnnnnnnnnnnnnnnnnnnnnnnnnnnnnnnnnnnnnnnnnnnnnnnnnnnnnnnnnnnnnnnnnnnnnnnnnnnnnnnnnnnnnnnnnnnnnnnnnnnnnnnnnnnnnnnnnnnnnnnnnnnnnnnnnnnnnnnnnnnnnnnnnnnnnnnnnnnnnnnnnnnnnnnnnnnnnnnnnnnnnnnnnnnnnnnnnnnnnnnnnnnnnnnnnnnnnnnnnnnnnnnnnnnnnnnnnnnnnnnnnnnnnnnnnnnnnnnnnnnnnnnnnnnnnnnnnnnnnnnnnnnnnnnnnnnnnnnnnnnnnnnnnnnnnnnnnnnnnnnnnnnnnnnnnnnnnnnnnnnnnnnnnnnnnnnnnnnnnnnnnnnnnnnnnnnnnnnnnnnnnnnnnnnnnnnnnnnnnnnnnnnnnnnnnnnnnnnnnnnnnnnnnnnnnnnnnnnnnnnnnnnnnnnnnnnnnnnnnnnnnnnnnnnnnnnnnnnnnnnnnnnnnnnnnnnnnnnnnnnnnnnnnnnnnnnnnnnnnnnnnnnnnnnnnnnnnnnnnnnnnnnnnnnnnnnnnnnnnnnnnnnnnnnnnnnnnnnnnnnnnnnnnnnnnnnnnnnnnnnnnnnnnnnnnnnnnnnnnnnnnnnnnnnnnnnnnnnnnnnnnnnnnnnnnnnnnnnnnnnnnnnnnnnnnnnnnnnnnnnnnnnnnnnnnnnnnnnnnnnnnnnnnnnnnnnnnnnnnnnnnnnnnnnnnnnnnnnnnnnnnnnnnnnnnnnnnnnnnnnnnnnnnnnnnnnnnnnnnnnnnnnnnnnnnnnnnnnnnnnnnnnnnnnnnnnnnnnnnnnnnnnnnnnnnnnnnnnnnnnnnnnnnnnnnnnnnnnnnnnnnnnnnnnnnnnnnnnnnnnnnnnnnnnnnnnnnnnnnnnnnnnnnnnnnnnnnnnnnnnnnnnnnnnnnnnnnnnnnnnnnnnnnnnnnnnnnnnnnnnnnnnnnnnnnnnnnnnnnnnnnnnnnnnnnnnnnnnnnnnnnnnnnnnnnnnnnnnnnnnnnnnnnnnnnnnnnnnnnnnnnnnnnnnnnnnnnnnnnnnnnnnnnnnnnnnnnnnnnnnnnnnnnnnnnnnnnnnnnnnnnnnnnnnnnnnnnnnnnnnnnnnnnnnnnnnnnnnnnnnnnnnnnnnnnnnnnnnnnnnnnnnnnnnnnnnnnnnnnnnnnnnnnnnnnnnnnnnnnnnnnnnnnnnnnnnnnnnnnnnnnnnnnnnnnnnnnnnnnnnnnnnnnnnnnnnnnnnnnnnnnnnnnnnnnnnnnnnnnnnnnnnnnnnnnnnnnnnnnnnnnnnnnnnnnnnnnnnnnnnnnnnnnnnnnnnnnnnnnnnnnnnnnnnnnnnnnnnnnnnnnnnnnnnnnnnnnnnnnnnnnnnnnnnnnnnnnnnnnnnnnnnnnnnnnnnnnnnnnnnnnnnnnnnnnnnnnnnnnnnnnnnnnnnnnnnnnnnnnnnnnnnnnnnnnnnnnnnnnnnnnnnnnnnnnnnnnnnnnnnnnnnnnnnnnnnnnnnnnnnnnnnnnnnnnnnnnnnnnnnnnnnnnnnnnnnnnnnnnnnnnnnnnnnnnnnnnnnnnnnnnnnnnnnnnnnnnnnnnnnnnnnnnnnnnnnnnnnnnnnnnnnnnnnnnnnnnnnnnnnnnnnnnnnnnnnnnnnnnnnnnnnnnnnnnnnnnnnnnnnnnnnnnnnnnnnnnnnnnnnnnnnnnnnnnnnnnnnnnnnnnnnnnnnnnnnnnnnnnnnnnnnnnnnnnnnnnnnnnnnnnnnnnnnnnnnnnnnnnnnnnnnnnnnnnnnnnnnnnnnnnnnnnnnnnnnnnnnnnnnnnnnnnnnnnnnnnnnnnnnnnnnnnnnnnnnnnnnnnnnnnnnnnnnnnnnnnnnnnnnnnnnnnnnnnnnnnnnnnnnnnnnnnnnnnnnnnnnnnnnnnnnnnnnnnnnnnnnnnnnnnnnnnnnnnnnnnnnnnnnnnnnnnnnnnnnnnnnnnnnnnnnnnnnnnnnnnnnnnnnnnnnnnnnnnnnnnnnnnnnnnnnnnnnnnnnnnnnnnnnnnnnnnnnnnnnnnnnnnnnnnnnnnnnnnnnnnnnnnnnnnnnnnnnnnnnnnnnnnnnnnnnnnnnnnnnnnnnnnnnnnnnnnnnnnnnnnnnnnnnnnnnnnnnnnnnnnnnnnnnnnnnnnnnnnnnnnnnnnnnnnnnnnnnnnnnnnnnnnnnnnnnnnnnnnnnnnnnnnnnnnnnnnnnnnnnnnnnnnnnnnnnnnnnnnnnnnnnnnnnnnnnnnnnnnnnnnnnnnnnnnnnnnnnnnnnnnnnnnnnnnnnnnnnnnnnnnnnnnnnnnnnnnnnnnnnnnnnnnnnnnnnnnnnnnnnnnnnnnnnnnnnnnnnnnnnnnnnnnnnnnnnnnnnnnnnnnnnnnnnnnnnnnnnnnnnnnnnnnnnnnnnnnnnnnnnnnnnnnnnnnnnnnnnnnnnnnnnnnnnnnnnnnnnnnnnnnnnnnnnnnnnnnnnnnnnnnnnnnnnnnnnnnnnnnnnnnnnnnnnnnnnnnnnnnnnnnnnnnnnnnnnnnnnnnnnnnnnnnnnnnnnnnnnnnnnnnnnnnnnnnnnnnnnnnnnnnnnnnnnnnnnnnnnnnnnnnnnnnnnnnnnnnnnnnnnnnnnnnnnnnnnnnnnnnnnnnnnnnnnnnnnnnnnnnnnnnnnnnnnnnnnnnnnnnnnnnnnnnnnnnnnnnnnnnnnnnnnnnnnnnnnnnnnnnnnnnnnnnnnnnnnnnnnnnnnnnnnnnnnnnnnnnnnnnnnnnnnnnnnnnnnnnnnnnnnnnnnnnnnnnnnnnnnnnnnnnnnnnnnnnnnnnnnnnnnnnnnnnnnnnnnnnnnnnnnnnnnnnnnnnnnnnnnnnnnnnnnnnnnnnnnnnnnnnnnnnnnnnnnnnnnnnnnnnnnnnnnnnnnnnnnnnnnnnnnnnnnnnnnnnnnnnnnnnnnnnnnnnnnnnnnnnnnnnnnnnnnnnnnnnnnnnnnnnnnnnnnnnnnnnnnnnnnnnnnnnnnnnnnnnnnnnnnnnnnnnnnnnnnnnnnnnnnnnnnnnnnnnnnnnnnnnnnnnnnnnnnnnnnnnnnnnnnnnnnnnnnnnnnnnnnnnnnnnnnnnnnnnnnnnnnnnnnnnnnnnnnnnnnnnnnnnnnnnnnnnnnnnnnnnnnnnnnnnnnnnnnnnnnnnnnnnnnnnnnnnnnnnnnnnnnnnnnnnnnnnnnnnnnnnnnnnnnnnnnnnnnnnnnnnnnnnnnnnnnnnnnnnnnnnnnnnnnnnnnnnnnnnnnnnnnnnnnnnnnnnnnnnnnnnnnnnnnnnnnnnnnnnnnnnnnnnnnnnnnnnnnnnnnnnnnnnnnnnnnnnnnnnnnnnnnnnnnnnnnnnnnnnnnnnnnnnnnnnnnnnnnnnnnnnnnnnnnnnnnnnnnnnnnnnnnnnnnnnnnnnnnnnnnnnnnnnnnnnnnnnnnnnnnnnnnnnnnnnnnnnnnnnnnnnnnnnnnnnnnnnnnnnnnnnnnnnnnnnnnnnnnnnnnnnnnnnnnnnnnnnnnnnnnnnnnnnnnnnnnnnnnnnnnnnnnnnnnnnnnnnnnnnnnnnnnnnnnnnnnnnnnnnnnnnnnnnnnnnnnnnnnnnnnnnnnnnnnnnnnnnnnnnnnnnnnnnnnnnnnnnnnnnnnnnnnnnnnnnnnnnnnnnnnnnnnnnnnnnnnnnnnnnnnnnnnnnnnnnnnnnnnnnnnnnnnnnnnnnnnnnnnnnnnnnnnnnnnnnnnnnnnnnnnnnnnnnnnnnnnnnnnnnnnnnnnnnnnnnnnnnnnnnnnnnnnnnnnnnnnnnnnnnnnnnnnnnnnnnnnnnnnnnnnnnnnnnnnnnnnnnnnnnnnnnnnnnnnnnnnnnnnnnnnnnnnnnnnnnnnnnnnnnnnnnnnnnnnnnnnnnnnnnnnnnnnnnnnnnnnnnnnnnnnnnnnnnnnnnnnnnnnnnnnnnnnnnnnnnnnnnnnnnnnnnnnnnnnnnnnnnnnnnnnnnnnnnnnnnnnnnnnnnnnnnnnnnnnnnnnnnnnnnnnnnnnnnnnnnnnnnnnnnnnnnnnnnnnnnnnnnnnnnnnnnnnnnnnnnnnnnnnnnnnnnnnnnnnnnnnnnnnnnnnnnnnnnnnnnnnnnnnnnnnnnnnnnnnnnnnnnnnnnnnnnnnnnnnnnnnnnnnnnnnnnnnnnnnnnnnnnnnnnnnnnnnnnnnnnnnnnnnnnnnnnnnnnnnnnnnnnnnnnnnnnnnnnnnnnnnnnnnnnnnnnnnnnnnnnnnnnnnnnnnnnnnnnnnnnnnnnnnnnnnnnnnnnnnnnnnnnnnnnnnnnnnnnnnnnnnnnnnnnnnnnnnnnnnnnnnnnnnnnnnnnnnnnnnnnnnnnnnnnnnnnnnnnnnnnnnnnnnnnnnnnnnnnnnnnnnnnnnnnnnnnnnnnnnnnnnnnnnnnnnnnnnnnnnnnnnnnnnnnnnnnnnnnnnnnnnnnnnnnnnnnnnnnnnnnnnnnnnnnnnnnnnnnnnnnnnnnnnnnnnnnnnnnnnnnnnnnnnnnnnnnnnnnnnnnnnnnnnnnnnnnnnnnnnnnnnnnnnnnnnnnnnnnnnnnnnnnnnnnnnnnnnnnnnnnnnnnnnnnnnnnnnnnnnnnnnnnnnnnnnnnnnnnnnnnnnnnnnnnnnnnnnnnnnnnnnnnnnnnnnnnnnnnnnnnnnnnnnnnnnnnnnnnnnnnnnnnnnnnnnnnnnnnnnnnnnnnnnnnnnnnnnnnnnnnnnnnnnnnnnnnnnnnnnnnnnnnnnnnnnnnnnnnnnnnnnnnnnnnnnnnnnnnnnnnnnnnnnnnnnnnnnnnnnnnnnnnnnnnnnnnnnnnnnnnnnnnnnnnnnnnnnnnnnnnnnnnnnnnnnnnnnnnnnnnnnnnnnnnnnnnnnnnnnnnnnnnnnnnnnnnnnnnnnnnnnnnnnnnnnnnnnnnnnnnnnnnnnnnnnnnnnnnnnnnnnnnnnnnnnnnnnnnnnnnnnnnnnnnnnnnnnnnnnnnnnnnnnnnnnnnnnnnnnnnnnnnnnnnnnnnnnnnnnnnnnnnnnnnnnnnnnnnnnnnnnnnnnnnnnnnnnnnnnnnnnnnnnnnnnnnnnnnnnnnnnnnnnnnnnnnnnnnnnnnnnnnnnnnnnnnnnnnnnnnnnnnnnnnnnnnnnnnnnnnnnnnnnnnnnnnnnnnnnnnnnnnnnnnnnnnnnnnnnnnnnnnnnnnnnnnnnnnnnnnnnnnnnnnnnnnnnnnnnnnnnnnnnnnnnnnnnnnnnnnnnnnnnnnnnnnnnnnnnnnnnnnnnnnnnnnnnnnnnnnnnnnnnnnnnnnnnnnnnnnnnnnnnnnnnnnnnnnnnnnnnnnnnnnnnnnnnnnnnnnnnnnnnnnnnnnnnnnnnnnnnnnnnnnnnnnnnnnnnnnnnnnnnnnnnnnnnnnnnnnnnnnnnnnnnnnnnnnnnnnnnnnnnnnnnnnnnnnnnnnnnnnnnnnnnnnnnnnnnnnnnnnnnnnnnnnnnnnnnnnnnnnnnnnnnnnnnnnnnnnnnnnnnnnnnnnnnnnnnnnnnnnnnnnnnnnnnnnnnnnnnnnnnnnnnnnnnnnnnnnnnnnnnnnnnnnnnnnnnnnnnnnnnnnnnnnnnnnnnnnnnnnnnnnnnnnnnnnnnnnnnnnnnnnnnnnnnnnnnnnnnnnnnnnnnnnnnnnnnnnnnnnnnnnnnnnnnnnnnnnnnnnnnnnnnnnnnnnnnnnnnnnnnnnnnnnnnnnnnnnnnnnnnnnnnnnnnnnnnnnnnnnnnnnnnnnnnnnnnnnnnnnnnnnnnnnnnnnnnnnnnnnnnnnnnnnnnnnnnnnnnnnnnnnnnnnnnnnnnnnnnnnnnnnnnnnnnnnnnnnnnnnnnnnnnnnnnnnnnnnnnnnnnnnnnnnnnnnnnnnnnnnnnnnnnnnnnnnnnnnnnnnnnnnnnnnnnnnnnnnnnnnnnnnnnnnnnnnnnnnnnnnnnnnnnnnnnnnnnnnnnnnnnnnnnnnnnnnnnnnnnnnnnnnnnnnnnnnnnnnnnnnnnnnnnnnnnnnnnnnnnnnnnnnnnnnnnnnnnnnnnnnnnnnnnnnnnnnnnnnnnnnnnnnnnnnnnnnnnnnnnnnnnnnnnnnnnnnnnnnnnnnnnnnnnnnnnnnnnnnnnnnnnnnnnnnnnnnnnnnnnnnnnnnnnnnnnnnnnnnnnnnnnnnnnnnnnnnnnnnnnnnnnnnnnnnnnnnnnnnnnnnnnnnnnnnnnnnnnnnnnnnnnnnnnnnnnnnnnnnnnnnnnnnnnnnnnnnnnnnnnnnnnnnnnnnnnnnnnnnnnnnnnnnnnnnnnnnnnnnnnnnnnnnnnnnnnnnnnnnnnnnnnnnnnnnnnnnnnnnnnnnnnnnnnnnnnnnnnnnnnnnnnnnnnnnnnnnnnnnnnnnnnnnnnnnnnnnnnnnnnnnnnnnnnnnnnnnnnnnnnnnnnnnnnnnnnnnnnnnnnnnnnnnnnnnnnnnnnnnnnnnnnnnnnnnnnnnnnnnnnnnnnnnnnnnnnnnnnnnnnnnnnnnnnnnnnnnnnnnnnnnnnnnnnnnnnnnnnnnnnnnnnnnnnnnnnnnnnnnnnnnnnnnnnnnnnnnnnnnnnnnnnnnnnnnnnnnnnnnnnnnnnnnnnnnnnnnnnnnnnnnnnnnnnnnnnnnnnnnnnnnnnnnnnnnnnnnnnnnnnnnnnnnnnnnnnnnnnnnnnnnnnnnnnnnnnnnnnnnnnnnnnnnnnnnnnnnnnnnnnnnnnnnnnnnnnnnnnnnnnnnnnnnnnnnnnnnnnnnnnnnnnnnnnnnnnnnnnnnnnnnnnnnnnnnnnnnnnnnnnnnnnnnnnnnnnnnnnnnnnnnnnnnnnnnnnnnnnnnnnnnnnnnnnnnnnnnnnnnnnnnnnnnnnnnnnnnnnnnnnnnnnnnnnnnnnnnnnnnnnnnnnnnnnnnnnnnnnnnnnnnnnnnnnnnnnnnnnnnnnnnnnnnnnnnnnnnnnnnnnnnnnnnnnnnnnnnnnnnnnnnnnnnnnnnnnnnnnnnnnnnnnnnnnnnnnnnnnnnnnnnnnnnnnnnnnnnnnnnnnnnnnnnnnnnnnnnnnnnnnnnnnnnnnnnnnnnnnnnnnnnnnnnnnnnnnnnnnnnnnnnnnnnnnnnnnnnnnnnnnnnnnnnnnnnnnnnnnnnnnnnnnnnnnnnnnnnnnnnnnnnnnnnnnnnnnnnnnnnnnnnnnnnnnnnnnnnnnnnnnnnnnnnnnnnnnnnnnnnnnnnnnnnnnnnnnnnnnnnnnnnnnnnnnnnnnnnnnnnnnnnnnnnnnnnnnnnnnnnnnnnnnnnnnnnnnnnnnnnnnnnnnnnnnnnnnnnnnnnnnnnnnnnnnnnnnnnnnnnnnnnnnnnnnnnnnnnnnnnnnnnnnnnnnnnnnnnnnnnnnnnnnnnnnnnnnnnnnnnnnnnnnnnnnnnnnnnnnnnnnnnnnnnnnnnnnnnnnnnnnnnnnnnnnnnnnnnnnnnnnnnnnnnnnnnnnnnnnnnnnnnnnnnnnnnnnnnnnnnnnnnnnnnnnnnnnnnnnnnnnnnnnnnnnnnnnnnnnnnnnnnnnnnnnnnnnnnnnnnnnnnnnnnnnnnnnnnnnnnnnnnnnnnnnnnnnnnnnnnnnnnnnnnnnnnnnnnnnnnnnnnnnnnnnnnnnnnnnnnnnnnnnnnnnnnnnnnnnnnnnnnnnnnnnnnnnnnnnnnnnnnnnnnnnnnnnnnnnnnnnnnnnnnnnnnnnnnnnnnnnnnnnnnnnnnnnnnnnnnnnnnnnnnnnnnnnnnnnnnnnnnnnnnnnnnnnnnnnnnnnnnnnnnnnnnnnnnnnnnnnnnnnnnnnnnnnnnnnnnnnnnnnnnnnnnnnnnnnnnnnnnnnnnnnnnnnnnnnnnnnnnnnnnnnnnnnnnnnnnnnnnnnnnnnnnnnnnnnnnnnnnnnnnnnnnnnnnnnnnnnnnnnnnnnnnnnnnnnnnnnnnnnnnnnnnnnnnnnnnnnnnnnnnnnnnnnnnnnnnnnnnnnnnnnnnnnnnnnnnnnnnnnnnnnnnnnnnnnnnnnnnnnnnnnnnnnnnnnnnnnnnnnnnnnnnnnnnnnnnnnnnnnnnnnnnnnnnnnnnnnnnnnnnnnnnnnnnnnnnnnnnnnnnnnnnnnnnnnnnnnnnnnnnnnnnnnnnnnnnnnnnnnnnnnnnnnnnnnnnnnnnnnnnnnnnnnnnnnnnnnnnnnnnnnnnnnnnnnnnnnnnnnnnnnnnnnnnnnnnnnnnnnnnnnnnnnnnnnnnnnnnnnnnnnnnnnnnnnnnnnnnnnnnnnnnnnnnnnnnnnnnnnnnnnnnnnnnnnnnnnnnnnnnnnnnnnnnnnnnnnnnnnnnnnnnnnnnnnnnnnnnnnnnnnnnnnnnnnnnnnnnnnnnnnnnnnnnnnnnnnnnnnnnnnnnnnnnnnnnnnnnnnnnnnnnnnnnnnnnnnnnnnnnnnnnnnnnnnnnnnnnnnnnnnnnnnnnnnnnnnnnnnnnnnnnnnnnnnnnnnnnnnnnnnnnnnnnnnnnnnnnnnnnnnnnnnnnnnnnnnnnnnnnnnnnnnnnnnnnnnnnnnnnnnnnnnnnnnnnnnnnnnnnnnnnnnnnnnnnnnnnnnnnnnnnnnnnnnnnnnnnnnnnnnnnnnnnnnnnnnnnnnnnnnnnnnnnnnnnnnnnnnnnnnnnnnnnnnnnnnnnnnnnnnnnnnnnnnnnnnnnnnnnnnnnnnnnnnnnnnnnnnnnnnnnnnnnnnnnnnnnnnnnnnnnnnnnnnnnnnnnnnnnnnnnnnnnnnnnnnnnnnnnnnnnnnnnnnnnnnnnnnnnnnnnnnnnnnnnnnnnnnnnnnnnnnnnnnnnnnnnnnnnnnnnnnnnnnnnnnnnnnnnnnnnnnnnnnnnnnnnnnnnnnnnnnnnnnnnnnnnnnnnnnnnnnnnnnnnnnnnnnnnnnnnnnnnnnnnnnnnnnnnnnnnnnnnnnnnnnnnnnnnnnnnnnnnnnnnnnnnnnnnnnnnnnnnnnnnnnnnnnnnnnnnnnnnnnnnnnnnnnnnnnnnnnnnnnnnnnnnnnnnnnnnnnnnnnnnnnnnnnnnnnnnnnnnnnnnnnnnnnnnnnnnnnnnnnnnnnnnnnnnnnnnnnnnnnnnnnnnnnnnnnnnnnnnnnnnnnnnnnnnnnnnnnnnnnnnnnnnnnnnnnnnnnnnnnnnnnnnnnnnnnnnnnnnnnnnnnnnnnnnnnnnnnnnnnnnnnnnnnnnnnnnnnnnnnnnnnnnnnnnnnnnnnnnnnnnnnnnnnnnnnnnnnnnnnnnnnnnnnnnnnnnnnnnnnnnnnnnnnnnnnnnnnnnnnnnnnnnnnnnnnnnnnnnnnnnnnnnnnnnnnnnnnnnnnnnnnnnnnnnnnnnnnnnnnnnnnnnnnnnnnnnnnnnnnnnnnnnnnnnnnnnnnnnnnnnnnnnnnnnnnnnnnnnnnnnnnnnnnnnnnnnnnnnnnnnnnnnnnnnnnnnnnnnnnnnnnnnnnnnnnnnnnnnnnnnnnnnnnnnnnnnnnnnnnnnnnnnnnnnnnnnnnnnnnnnnnnnnnnnnnnnnnnnnnnnnnnnnnnnnnnnnnnnnnnnnnnnnnnnnnnnnnnnnnnnnnnnnnnnnnnnnnnnnnnnnnnnnnnnnnnnnnnnnnnnnnnnnnnnnnnnnnnnnnnnnnnnnnnnnnnnnnnnnnnnnnnnnnnnnnnnnnnnnnnnnnnnnnnnnnnnnnnnnnnnnnnnnnnnnnnnnnnnnnnnnnnnnnnnnnnnnnnnnnnnnnnnnnnnnnnnnnnnnnnnnnnnnnnnnnnnnnnnnnnnnnnnnnnnnnnnnnnnnnnnnnnnnnnnnnnnnnnnnnnnnnnnnnnnnnnnnnnnnnnnnnnnnnnnnnnnnnnnnnnnnnnnnnnnnnnnnnnnnnnnnnnnnnnnnnnnnnnnnnnnnnnnnnnnnnnnnnnnnnnnnnnnnnnnnnnnnnnnnnnnnnnnnnnnnnnnnnnnnnnnnnnnnnnnnnnnnnnnnnnnnnnnnnnnnnnnnnnnnnnnnnnnnnnnnnnnnnnnnnnnnnnnnnnnnnnnnnnnnnnnnnnnnnnnnnnnnnnnnnnnnnnnnnnnnnnnnnnnnnnnnnnnnnnnnnnnnnnnnnnnnnnnnnnnnnnnnnnnnnnnnnnnnnnnnnnnnnnnnnnnnnnnnnnnnnnnnnnnnnnnnnnnnnnnnnnnnnnnnnnnnnnnnnnnnnnnnnnnnnnnnnnnnnnnnnnnnnnnnnnnnnnnnnnnnnnnnnnnnnnnnnnnnnnnnnnnnnnnnnnnnnnnnnnnnnnnnnnnnnnnnnnnnnnnnnnnnnnnnnnnnnnnnnnnnnnnnnnnnnnnnnnnnnnnnnnnnnnnnnnnnnnnnnnnnnnnnnnnnnnnnnnnnnnnnnnnnnnnnnnnnnnnnnnnnnnnnnnnnnnnnnnnnnnnnnnnnnnnnnnnnnnnnnnnnnnnnnnnnnnnnnnnnnnnnnnnnnnnnnnnnnnnnnnnnnnnnnnnnnnnnnnnnnnnnnnnnnnnnnnnnnnnnnnnnnnnnnnnnnnnnnnnnnnnnnnnnnnnnnnnnnnnnnnnnnnnnnnnnnnnnnnnnnnnnnnnnnnnnnnnnnnnnnnnnnnnnnnnnnnnnnnnnnnnnnnnnnnnnnnnnnnnnnnnnnnnnnnnnnnnnnnnnnnnnnnnnnnnnnnnnnnnnnnnnnnnnnnnnnnnnnnnnnnnnnnnnnnnnnnnnnnnnnnnnnnnnnnnnnnnnnnnnnnnnnnnnnnnnnnnnnnnnnnnnnnnnnnnnnnnnnnnnnnnnnnnnnnnnnnnnnnnnnnnnnnnnnnnnnnnnnnnnnnnnnnnnnnnnnnnnnnnnnnnnnnnnnnnnnnnnnnnnnnnnnnnnnnnnnnnnnnnnnnnnnnnnnnnnnnnnnnnnnnnnnnnnnnnnnnnnnnnnnnnnnnnnnnnnnnnnnnnnnnnnnnnnnnnnnnnnnnnnnnnnnnnnnnnnnnnnnnnnnnnnnnnnnnnnnnnnnnnnnnnnnnnnnnnnnnnnnnnnnnnnnnnnnnnnnnnnnnnnnnnnnnnnnnnnnnnnnnnnnnnnnnnnnnnnnnnnnnnnnnnnnnnnnnnnnnnnnnnnnnnnnnnnnnnnnnnnnnnnnnnnnnnnnnnnnnnnnnnnnnnnnnnnnnnnnnnnnnnnnnnnnnnnnnnnnnnnnnnnnnnnnnnnnnnnnnnnnnnnnnnnnnnnnnnnnnnnnnnnnnnnnnnnnnnnnnnnnnnnnnnnnnnnnnnnnnnnnnnnnnnnnnnnnnnnnnnnnnnnnnnnnnnnnnnnnnnnnnnnnnnnnnnnnnnnnnnnnnnnnnnnnnnnnnnnnnnnnnnnnnnnnnnnnnnnnnnnnnnnnnnnnnnnnnnnnnnnnnnnnnnnnnnnnnnnnnnnnnnnnnnnnnnnnnnnnnnnnnnnnnnnnnnnnnnnnnnnnnnnnnnnnnnnnnnnnnnnnnnnnnnnnnnnnnnnnnnnnnnnnnnnnnnnnnnnnnnnnnnnnnnnnnnnnnnnnnnnnnnnnnnnnnnnnnnnnnnnnnnnnnnnnnnnnnnnnnnnnnnnnnnnnnnnnnnnnnnnnnnnnnnnnnnnnnnnnnnnnnnnnnnnnnnnnnnnnnnnnnnnnnnnnnnnnnnnnnnnnnnnnnnnnnnnnnnnnnnnnnnnnnnnnnnnnnnnnnnnnnnnnnnnnnnnnnnnnnnnnnnnnnnnnnnnnnnnnnnnnnnnnnnnnnnnnnnnnnnnnnnnnnnnnnnnnnnnnnnnnnnnnnnnnnnnnnnnnnnnnnnnnnnnnnnnnnnnnnnnnnnnnnnnnnnnnnnnnnnnnnnnnnnnnnnnnnnnnnnnnnnnnnnnnnnnnnnnnnnnnnnnnnnnnnnnnnnnnnnnnnnnnnnnnnnnnnnnnnnnnnnnnnnnnnnnnnnnnnnnnnnnnnnnnnnnnnnnnnnnnnnnnnnnnnnnnnnnnnnnnnnnnnnnnnnnnnnnnnnnnnnnnnnnnnnnnnnnnnnnnnnnnnnnnnnnnnnnnnnnnnnnnnnnnnnnnnnnnnnnnnnnnnnnnnnnnnnnnnnnnnnnnnnnnnnnnnnnnnnnnnnnnnnnnnnnnnnnnnnnnnnnnnnnnnnnnnnnnnnnnnnnnnnnnnnnnnnnnnnnnnnnnnnnnnnnnnnnnnnnnnnnnnnnnnnnnnnnnnnnnnnnnnnnnnnnnnnnnnnnnnnnnnnnnnnnnnnnnnnnnnnnnnnnnnnnnnnnnnnnnnnnnnnnnnnnnnnnnnnnnnnnnnnnnnnnnnnnnnnnnnnnnnnnnnnnnnnnnnnnnnnnnnnnnnnnnnnnnnnnnnnnnnnnnnnnnnnnnnnnnnnnnnnnnnnnnnnnnnnnnnnnnnnnnnnnnnnnnnnnnnnnnnnnnnnnnnnnnnnnnnnnnnnnnnnnnnnnnnnnnnnnnnnnnnnnnnnnnnnnnnnnnnnnnnnnnnnnnnnnnnnnnnnnnnnnnnnnnnnnnnnnnnnnnnnnnnnnnnnnnnnnnnnnnnnnnnnnnnnnnnnnnnnnnnnnnnnnnnnnnnnnnnnnnnnnnnnnnnnnnnnnnnnnnnnnnnnnnnnnnnnnnnnnnnnnnnnnnnnnnnnnnnnnnnnnnnnnnnnnnnnnnnnnnnnnnnnnnnnnnnnnnnnnnnnnnnnnnnnnnnnnnnnnnnnnnnnnnnnnnnnnnnnnnnnnnnnnnnnnnnnnnnnnnnnnnnnnnnnnnnnnnnnnnnnnnnnnnnnnnnnnnnnnnnnnnnnnnnnnnnnnnnnnnnnnnnnnnnnnnnnnnnnnnnnnnnnnnnnnnnnnnnnnnnnnnnnnnnnnnnnnnnnnnnnnnnnnnnnnnnnnnnnnnnnnnnnnnnnnnnnnnnnnnnnnnnnnnnnnnnnnnnnnnnnnnnnnnnnnnnnnnnnnnnnnnnnnnnnnnnnnnnnnnnnnnnnnnnnnnnnnnnnnnnnnnnnnnnnnnnnnnnnnnnnnnnnnnnnnnnnnnnnnnnnnnnnnnnnnnnnnnnnnnnnnnnnnnnnnnnnnnnnnnnnnnnnnnnnnnnnnnnnnnnnnnnnnnnnnnnnnnnnnnnnnnnnnnnnnnnnnnnnnnnnnnnnnnnnnnnnnnnnnnnnnnnnnnnnnnnnnnnnnnnnnnnnnnnnnnnnnnnnnnnnnnnnnnnnnnnnnnnnnnnnnnnnnnnnnnnnnnnnnnnnnnnnnnnnnnnnnnnnnnnnnnnnnnnnnnnnnnnnnnnnnnnnnnnnnnnnnnnnnnnnnnnnnnnnnnnnnnnnnnnnnnnnnnnnnnnnnnnnnnnnnnnnnnnnnnnnnnnnnnnnnnnnnnnnnnnnnnnnnnnnnnnnnnnnnnnnnnnnnnnnnnnnnnnnnnnnnnnnnnnnnnnnnnnnnnnnnnnnnnnnnnnnnnnnnnnnnnnnnnnnnnnnnnnnnnnnnnnnnnnnnnnnnnnnnnnnnnnnnnnnnnnnnnnnnnnnnnnnnnnnnnnnnnnnnnnnnnnnnnnnnnnnnnnnnnnnnnnnnnnnnnnnnnnnnnnnnnnnnnnnnnnnnnnnnnnnnnnnnnnnnnnnnnnnnnnnnnnnnnnnnnnnnnnnnnnnnnnnnnnnnnnnnnnnnnnnnnnnnnnnnnnnnnnnnnnnnnnnnnnnnnnnnnnnnnnnnnnnnnnnnnnnnnnnnnnnnnnnnnnnnnnnnnnnnnnnnnnnnnnnnnnnnnnnnnnnnnnnnnnnnnnnnnnnnnnnnnnnnnnnnnnnnnnnnnnnnnnnnnnnnnnnnnnnnnnnnnnnnnnnnnnnnnnnnnnnnnnnnnnnnnnnnnnnnnnnnnnnnnnnnnnnnnnnnnnnnnnnnnnnnnnnnnnnnnnnnnnnnnnnnnnnnnnnnnnnnnnnnnnnnnnnnnnnnnnnnnnnnnnnnnnnnnnnnnnnnnnnnnnnnnnnnnnnnnnnnnnnnnnnnnnnnnnnnnnnnnnnnnnnnnnnnnnnnnnnnnnnnnnnnnnnnnnnnnnnnnnnnnnnnnnnnnnnnnnnnnnnnnnnnnnnnnnnnnnnnnnnnnnnnnnnnnnnnnnnnnnnnnnnnnnnnnnnnnnnnnnnnnnnnnnnnnnnnnnnnnnnnnnnnnnnnnnnnnnnnnnnnnnnnnnnnnnnnnnnnnnnnnnnnnnnnnnnnnnnnnnnnnnnnnnnnnnnnnnnnnnnnnnnnnnnnnnnnnnnnnnnnnnnnnnnnnnnnnnnnnnnnnnnnnnnnnnnnnnnnnnnnnnnnnnnnnnnnnnnnnnnnnnnnnnnnnnnnnnnnnnnnnnnnnnnnnnnnnnnnnnnnnnnnnnnnnnnnnnnnnnnnnnnnnnnnnnnnnnnnnnnnnnnnnnnnnnnnnnnnnnnnnnnnnnnnnnnnnnnnnnnnnnnnnnnnnnnnnnnnnnnnnnnnnnnnnnnnnnnnnnnnnnnnnnnnnnnnnnnnnnnnnnnnnnnnnnnnnnnnnnnnnnnnnnnnnnnnnnnnnnnnnnnnnnnnnnnnnnnnnnnnnnnnnnnnnnnnnnnnnnnnnnnnnnnnnnnnnnnnnnnnnnnnnnnnnnnnnnnnnnnnnnnnnnnnnnnnnnnnnnnnnnnnnnnnnnnnnnnnnnnnnnnnnnnnnnnnnnnnnnnnnnnnnnnnnnnnnnnnnnnnnnnnnnnnnnnnnnnnnnnnnnnnnnnnnnnnnnnnnnnnnnnnnnnnnnnnnnnnnnnnnnnnnnnnnnnnnnnnnnnnnnnnnnnnnnnnnnnnnnnnnnnnnnnnnnnnnnnnnnnnnnnnnnnnnnnnnnnnnnnnnnnnnnnnnnnnnnnnnnnnnnnnnnnnnnnnnnnnnnnnnnnnnnnnnnnnnnnnnnnnnnnnnnnnnnnnnnnnnnnnnnnnnnnnnnnnnnnnnnnnnnnnnnnnnnnnnnnnnnnnnnnnnnnnnnnnnnnnnnnnnnnnnnnnnnnnnnnnnnnnnnnnnnnnnnnnnnnnnnnnnnnnnnnnnnnnnnnnnnnnnnnnnnnnnnnnnnnnnnnnnnnnnnnnnnnnnnnnnnnnnnnnnnnnnnnnnnnnnnnnnnnnnnnnnnnnnnnnnnnnnnnnnnnnnnnnnnnnnnnnnnnnnnnnnnnnnnnnnnnnnnnnnnnnnnnnnnnnnnnnnnnnnnnnnnnnnnnnnnnnnnnnnnnnnnnnnnnnnnnnnnnnnnnnnnnnnnnnnnnnnnnnnnnnnnnnnnnnnnnnnnnnnnnnnnnnnnnnnnnnnnnnnnnnnnnnnnnnnnnnnnnnnnnnnnnnnnnnnnnnnnnnnnnnnnnnnnnnnnnnnnnnnnnnnnnnnnnnnnnnnnnnnnnnnnnnnnnnnnnnnnnnnnnnnnnnnnnnnnnnnnnnnnnnnnnnnnnnnnnnnnnnnnnnnnnnnnnnnnnnnnnnnnnnnnnnnnnnnnnnnnnnnnnnnnnnnnnnnnnnnnnnnnnnnnnnnnnnnnnnnnnnnnnnnnnnnnnnnnnnnnnnnnnnnnnnnnnnnnnnnnnnnnnnnnnnnnnnnnnnnnnnnnnnnnnnnnnnnnnnnnnnnnnnnnnnnnnnnnnnnnnnnnnnnnnnnnnnnnnnnnnnnnnnnnnnnnnnnnnnnnnnnnnnnnnnnnnnnnnnnnnnnnnnnnnnnnnnnnnnnnnnnnnnnnnnnnnnnnnnnnnnnnnnnnnnnnnnnnnnnnnnnnnnnnnnnnnnnnnnnnnnnnnnnnnnnnnnnnnnnnnnnnnnnnnnnnnnnnnnnnnnnnnnnnnnnnnnnnnnnnnnnnnnnnnnnnnnnnnnnnnnnnnnnnnnnnnnnnnnnnnnnnnnnnnnnnnnnnnnnnnnnnnnnnnnnnnnnnnnnnnnnnnnnnnnnnnnnnnnnnnnnnnnnnnnnnnnnnnnnnnnnnnnnnnnnnnnnnnnnnnnnnnnnnnnnnnnnnnnnnnnnnnnnnnnnnnnnnnnnnnnnnnnnnnnnnnnnnnnnnnnnnnnnnnnnnnnnnnnnnnnnnnnnnnnnnnnnnnnnnnnnnnnnnnnnnnnnnnnnnnnnnnnnnnnnnnnnnnnnnnnnnnnnnnnnnnnnnnnnnnnnnnnnnnnnnnnnnnnnnnnnnnnnnnnnnnnnnnnnnnnnnnnnnnnnnnnnnnnnnnnnnnnnnnnnnnnnnnnnnnnnnnnnnnnnnnnnnnnnnnnnnnnnnnnnnnnnnnnnnnnnnnnnnnnnnnnnnnnnnnnnnnnnnnnnnnnnnnnnnnnnnnnnnnnnnnnnnnnnnnnnnnnnnnnnnnnnnnnnnnnnnnnnnnnnnnnnnnnnnnnnnnnnnnnnnnnnnnnnnnnnnnnnnnnnnnnnnnnnnnnnnnnnnnnnnnnnnnnnnnnnnnnnnnnnnnnnnnnnnnnnnnnnnnnnnnnnnnnnnnnnnnnnnnnnnnnnnnnnnnnnnnnnnnnnnnnnnnnnnnnnnnnnnnnnnnnnnnnnnnnnnnnnnnnnnnnnnnnnnnnnnnnnnnnnnnnnnnnnnnnnnnnnnnnnnnnnnnnnnnnnnnnnnnnnnnnnnnnnnnnnnnnnnnnnnnnnnnnnnnnnnnnnnnnnnnnnnnnnnnnnnnnnnnnnnnnnnnnnnnnnnnnnnnnnnnnnnnnnnnnnnnnnnnnnnnnnnnnnnnnnnnnnnnnnnnnnnnnnnnnnnnnnnnnnnnnnnnnnnnnnnnnnnnnnnnnnnnnnnnnnnnnnnnnnnnnnnnnnnnnnnnnnnnnnnnnnnnnnnnnnnnnnnnnnnnnnnnnnnnnnnnnnnnnnnnnnnnnnnnnnnnnnnnnnnnnnnnnnnnnnnnnnnnnnnnnnnnnnnnnnnnnnnnnnnnnnnnnnnnnnnnnnnnnnnnnnnnnnnnnnnnnnnnnnnnnnnnnnnnnnnnnnnnnnnnnnnnnnnnnnnnnnnnnnnnnnnnnnnnnnnnnnnnnnnnnnnnnnnnnnnnnnnnnnnnnnnnnnnnnnnnnnnnnnnnnnnnnnnnnnnnnnnnnnnnnnnnnnnnnnnnnnnnnnnnnnnnnnnnnnnnnnnnnnnnnnnnnnnnnnnnnnnnnnnnnnnnnnnnnnnnnnnnnnnnnnnnnnnnnnnnnnnnnnnnnnnnnnnnnnnnnnnnnnnnnnnnnnnnnnnnnnnnnnnnnnnnnnnnnnnnnnnnnnnnnnnnnnnnnnnnnnnnnnnnnnnnnnnnnnnnnnnnnnnnnnnnnnnnnnnnnnnnnnnnnnnnnnnnnnnnnnnnnnnnnnnnnnnnnnnnnnnnnnnnnnnnnnnnnnnnnnnnnnnnnnnnnnnnnnnnnnnnnnnnnnnnnnnnnnnnnnnnnnnnnnnnnnnnnnnnnnnnnnnnnnnnnnnnnnnnnnnnnnnnnnnnnnnnnnnnnnnnnnnnnnnnnnnnnnnnnnnnnnnnnnnnnnnnnnnnnnnnnnnnnnnnnnnnnnnnnnnnnnnnnnnnnnnnnnnnnnnnnnnnnnnnnnnnnnnnnnnnnnnnnnnnnnnnnnnnnnnnnnnnnnnnnnnnnnnnnnnnnnnnnnnnnnnnnnnnnnnnnnnnnnnnnnnnnnnnnnnnnnnnnnnnnnnnnnnnnnnnnnnnnnnnnnnnnnnnnnnnnnnnnnnnnnnnnnnnnnnnnnnnnnnnnnnnnnnnnnnnnnnnnnnnnnnnnnnnnnnnnnnnnnnnnnnnnnnnnnnnnnnnnnnnnnnnnnnnnnnnnnnnnnnnnnnnnnnnnnnnnnnnnnnnnnnnnnnnnnnnnnnnnnnnnnnnnnnnnnnnnnnnnnnnnnnnnnnnnnnnnnnnnnnnnnnnnnnnnnnnnnnnnnnnnnnnnnnnnnnnnnnnnnnnnnnnnnnnnnnnnnnnnnnnnnnnnnnnnnnnnnnnnnnnnnnnnnnnnnnnnnnnnnnnnnnnnnnnnnnnnnnnnnnnnnnnnnnnnnnnnnnnnnnnnnnnnnnnnnnnnnnnnnnnnnnnnnnnnnnnnnnnnnnnnnnnnnnnnnnnnnnnnnnnnnnnnnnnnnnnnnnnnnnnnnnnnnnnnnnnnnnnnnnnnnnnnnnnnnnnnnnnnnnnnnnnnnnnnnnnnnnnnnnnnnnnnnnnnnnnnnnnnnnnnnnnnnnnnnnnnnnnnnnnnnnnnnnnnnnnnnnnnnnnnnnnnnnnnnnnnnnnnnnnnnnnnnnnnnnnnnnnnnnnnnnnnnnnnnnnnnnnnnnnnnnnnnnnnnnnnnnnnnnnnnnnnnnnnnnnnnnnnnnnnnnnnnnnnnnnnnnnnnnnnnnnnnnnnnnnnnnnnnnnnnnnnnnnnnnnnnnnnnnnnnnnnnnnnnnnnnnnnnnnnnnnnnnnnnnnnnnnnnnnnnnnnnnnnnnnnnnnnnnnnnnnnnnnnnnnnnnnnnnnnnnnnnnnnnnnnnnnnnnnnnnnnnnnnnnnnnnnnnnnnnnnnnnnnnnnnnnnnnnnnnnnnnnnnnnnnnnnnnnnnnnnnnnnnnnnnnnnnnnnnnnnnnnnnnnnnnnnnnnnnnnnnnnnnnnnnnnnnnnnnnnnnnnnnnnnnnnnnnnnnnnnnnnnnnnnnnnnnnnnnnnnnnnnnnnnnnnnnnnnnnnnnnnnnnnnnnnnnnnnnnnnnnnnnnnnnnnnnnnnnnnnnnnnnnnnnnnnnnnnnnnnnnnnnnnnnnnnnnnnnnnnnnnnnnnnnnnnnnnnnnnnnnnnnnnnnnnnnnnnnnnnnnnnnnnnnnnnnnnnnnnnnnnnnnnnnnnnnnnnnnnnnnnnnnnnnnnnnnnnnnnnnnnnnnnnnnnnnnnnnnnnnnnnnnnnnnnnnnnnnnnnnnnnnnnnnnnnnnnnnnnnnnnnnnnnnnnnnnnnnnnnnnnnnnnnnnnnnnnnnnnnnnnnnnnnnnnnnnnnnnnnnnnnnnnnnnnnnnnnnnnnnnnnnnnnnnnnnnnnnnnnnnnnnnnnnnnnnnnnnnnnnnnnnnnnnnnnnnnnnnnnnnnnnnnnnnnnnnnnnnnnnnnnnnnnnnnnnnnnnnnnnnnnnnnnnnnnnnnnnnnnnnnnnnnnnnnnnnnnnnnnnnnnnnnnnnnnnnnnnnnnnnnnnnnnnnnnnnnnnnnnnnnnnnnnnnnnnnnnnnnnnnnnnnnnnnnnnnnnnnnnnnnnnnnnnnnnnnnnnnnnnnnnnnnnnnnnnnnnnnnnnnnnnnnnnnnnnnnnnnnnnnnnnnnnnnnnnnnnnnnnnnnnnnnnnnnnnnnnnnnnnnnnnnnnnnnnnnnnnnnnnnnnnnnnnnnnnnnnnnnnnnnnnnnnnnnnnnnnnnnnnnnnnnnnnnnnnnnnnnnnnnnnnnnnnnnnnnnnnnnnnnnnnnnnnnnnnnnnnnnnnnnnnnnnnnnnnnnnnnnnnnnnnnnnnnnnnnnnnnnnnnnnnnnnnnnnnnnnnnnnnnnnnnnnnnnnnnnnnnnnnnnnnnnnnnnnnnnnnnnnnnnnnnnnnnnnnnnnnnnnnnnnnnnnnnnnnnnnnnnnnnnnnnnnnnnnnnnnnnnnnnnnnnnnnnnnnnnnnnnnnnnnnnnnnnnnnnnnnnnnnnnnnnnnnnnnnnnnnnnnnnnnnnnnnnnnnnnnnnnnnnnnnnnnnnnnnnnnnnnnnnnnnnnnnnnnnnnnnnnnnnnnnnnnnnnnnnnnnnnnnnnnnnnnnnnnnnnnnnnnnnnnnnnnnnnnnnnnnnnnnnnnnnnnnnnnnnnnnnnnnnnnnnnnnnnnnnnnnnnnnnnnnnnnnnnnnnnnnnnnnnnnnnnnnnnnnnnnnnnnnnnnnnnnnnnnnnnnnnnnnnnnnnnnnnnnnnnnnnnnnnnnnnnnnnnnnnnnnnnnnnnnnnnnnnnnnnnnnnnnnnnnnnnnnnnnnnnnnnnnnnnnnnnnnnnnnnnnnnnnnnnnnnnnnnnnnnnnnnnnnnnnnnnnnnnnnnnnnnnnnnnnnnnnnnnnnnnnnnnnnnnnnnnnnnnnnnnnnnnnnnnnnnnnnnnnnnnnnnnnnnnnnnnnnnnnnnnnnnnnnnnnnnnnnnnnnnnnnnnnnnnnnnnnnnnnnnnnnnnnnnnnnnnnnnnnnnnnnnnnnnnnnnnnnnnnnnnnnnnnnnnnnnnnnnnnnnnnnnnnnnnnnnnnnnnnnnnnnnnnnnnnnnnnnnnnnnnnnnnnnnnnnnnnnnnnnnnnnnnnnnnnnnnnnnnnnnnnnnnnnnnnnnnnnnnnnnnnnnnnnnnnnnnnnnnnnnnnnnnnnnnnnnnnnnnnnnnnnnnnnnnnnnnnnnnnnnnnnnnnnnnnnnnnnnnnnnnnnnnnnnnnnnnnnnnnnnnnnnnnnnnnnnnnnnnnnnnnnnnnnnnnnnnnnnnnnnnnnnnnnnnnnnnnnnnnnnnnnnnnnnnnnnnnnnnnnnnnnnnnnnnnnnnnnnnnnnnnnnnnnnnnnnnnnnnnnnnnnnnnnnnnnnnnnnnnnnnnnnnnnnnnnnnnnnnnnnnnnnnnnnnnnnnnnnnnnnnnnnnnnnnnnnnnnnnnnnnnnnnnnnnnnnnnnnnnnnnnnnnnnnnnnnnnnnnnnnnnnnnnnnnnnnnnnnnnnnnnnnnnnnnnnnnnnnnnnnnnnnnnnnnnnnnnnnnnnnnnnnnnnnnnnnnnnnnnnnnnnnnnnnnnnnnnnnnnnnnnnnnnnnnnnnnnnnnnnnnnnnnnnnnnnnnnnnnnnnnnnnnnnnnnnnnnnnnnnnnnnnnnnnnnnnnnnnnnnnnnnnnnnnnnnnnnnnnnnnnnnnnnnnnnnnnnnnnnnnnnnnnnnnnnnnnnnnnnnnnnnnnnnnnnnnnnnnnnnnnnnnnnnnnnnnnnnnnnnnnnnnnnnnnnnnnnnnnnnnnnnnnnnnnnnnnnnnnnnnnnnnnnnnnnnnnnnnnnnnnnnnnnnnnnnnnnnnnnnnnnnnnnnnnnnnnnnnnnnnnnnnnnnnnnnnnnnnnnnnnnnnnnnnnnnnnnnnnnnnnnnnnnnnnnnnnnnnnnnnnnnnnnnnnnnnnnnnnnnnnnnnnnnnnnnnnnnnnnnnnnnnnnnnnnnnnnnnnnnnnnnnnnnnnnnnnnnnnnnnnnnnnnnnnnnnnnnnnnnnnnnnnnnnnnnnnnnnnnnnnnnnnnnnnnnnnnnnnnnnnnnnnnnnnnnnnnnnnnnnnnnnnnnnnnnnnnnnnnnnnnnnnnnnnnnnnnnnnnnnnnnnnnnnnnnnnnnnnnnnnnnnnnnnnnnnnnnnnnnnnnnnnnnnnnnnnnnnnnnnnnnnnnnnnnnnnnnnnnnnnnnnnnnnnnnnnnnnnnnnnnnnnnnnnnnnnnnnnnnnnnnnnnnnnnnnnnnnnnnnnnnnnnnnnnnnnnnnnnnnnnnnnnnnnnnnnnnnnnnnnnnnnnnnnnnnnnnnnnnnnnnnnnnnnnnnnnnnnnnnnnnnnnnnnnnnnnnnnnnnnnnnnnnnnnnnnnnnnnnnnnnnnnnnnnnnnnnnnnnnnnnnnnnnnnnnnnnnnnnnnnnnnnnnnnnnnnnnnnnnnnnnnnnnnnnnnnnnnnnnnnnnnnnnnnnnnnnnnnnnnnnnnnnnnnnnnnnnnnnnnnnnnnnnnnnnnnnnnnnnnnnnnnnnnnnnnnnnnnnnnnnnnnnnnnnnnnnnnnnnnnnnnnnnnnnnnnnnnnnnnnnnnnnnnnnnnnnnnnnnnnnnnnnnnnnnnnnnnnnnnnnnnnnnnnnnnnnnnnnnnnnnnnnnnnnnnnnnnnnnnnnnnnnnnnnnnnnnnnnnnnnnnnnnnnnnnnnnnnnnnnnnnnnnnnnnnnnnnnnnnnnnnnnnnnnnnnnnnnnnnnnnnnnnnnnnnnnnnnnnnnnnnnnnnnnnnnnnnnnnnnnnnnnnnnnnnnnnnnnnnnnnnnnnnnnnnnnnnnnnnnnnnnnnnnnnnnnnnnnnnnnnnnnnnnnnnnnnnnnnnnnnnnnnnnnnnnnnnnnnnnnnnnnnnnnnnnnnnnnnnnnnnnnnnnnnnnnnnnnnnnnnnnnnnnnnnnnnnnnnnnnnnnnnnnnnnnnnnnnnnnnnnnnnnnnnnnnnnnnnnnnnnnnnnnnnnnnnnnnnnnnnnnnnnnnnnnnnnnnnnnnnnnnnnnnnnnnnnnnnnnnnnnnnnnnnnnnnnnnnnnnnnnnnnnnnnnnnnnnnnnnnnnnnnnnnnnnnnnnnnnnnnnnnnnnnnnnnnnnnnnnnnnnnnnnnnnnnnnnnnnnnnnnnnnnnnnnnnnnnnnnnnnnnnnnnnnnnnnnnnnnnnnnnnnnnnnnnnnnnnnnnnnnnnnnnnnnnnnnnnnnnnnnnnnnnnnnnnnnnnnnnnnnnnnnnnnnnnnnnnnnnnnnnnnnnnnnnnnnnnnnnnnnnnnnnnnnnnnnnnnnnnnnnnnnnnnnnnnnnnnnnnnnnnnnnnnnnnnnnnnnnnnnnnnnnnnnnnnnnnnnnnnnnnnnnnnnnnnnnnnnnnnnnnnnnnnnnnnnnnnnnnnnnnnnnnnnnnnnnnnnnnnnnnnnnnnnnnnnnnnnnnnnnnnnnnnnnnnnnnnnnnnnnnnnnnnnnnnnnnnnnnnnnnnnnnnnnnnnnnnnnnnnnnnnnnnnnnnnnnnnnnnnnnnnnnnnnnnnnnnnnnnnnnnnnnnnnnnnnnnnnnnnnnnnnnnnnnnnnnnnnnnnnnnnnnnnnnnnnnnnnnnnnnnnnnnnnnnnnnnnnnnnnnnnnnnnnnnnnnnnnnnnnnnnnnnnnnnnnnnnnnnnnnnnnnnnnnnnnnnnnnnnnnnnnnnnnnnnnnnnnnnnnnnnnnnnnnnnnnnnnnnnnnnnnnnnnnnnnnnnnnnnnnnnnnnnnnnnnnnnnnnnnnnnnnnnnnnnnnnnnnnnnnnnnnnnnnnnnnnnnnnnnnnnnnnnnnnnnnnnnnnnnnnnnnnnnnnnnnnnnnnnnnnnnnnnnnnnnnnnnnnnnnnnnnnnnnnnnnnnnnnnnnnnnnnnnnnnnnnnnnnnnnnnnnnnnnnnnnnnnnnnnnnnnnnnnnnnnnnnnnnnnnnnnnnnnnnnnnnnnnnnnnnnnnnnnnnnnnnnnnnnnnnnnnnnnnnnnnnnnnnnnnnnnnnnnnnnnnnnnnnnnnnnnnnnnnnnnnnnnnnnnnnnnnnnnnnnnnnnnnnnnnnnnnnnnnnnnnnnnnnnnnnnnnnnnnnnnnnnnnnnnnnnnnnnnnnnnnnnnnnnnnnnnnnnnnnnnnnnnnnnnnnnnnnnnnnnnnnnnnnnnnnnnnnnnnnnnnnnnnnnnnnnnnnnnnnnnnnnnnnnnnnnnnnnnnnnnnnnnnnnnnnnnnnnnnnnnnnnnnnnnnnnnnnnnnnnnnnnnnnnnnnnnnnnnnnnnnnnnnnnnnnnnnnnnnnnnnnnnnnnnnnnnnnnnnnnnnnnnnnnnnnnnnnnnnnnnnnnnnnnnnnnnnnnnnnnnnnnnnnnnnnnnnnnnnnnnnnnnnnnnnnnnnnnnnnnnnnnnnnnnnnnnnnnnnnnnnnnnnnnnnnnnnnnnnnnnnnnnnnnnnnnnnnnnnnnnnnnnnnnnnnnnnnnnnnnnnnnnnnnnnnnnnnnnnnnnnnnnnnnnnnnnnnnnnnnnnnnnnnnnnnnnnnnnnnnnnnnnnnnnnnnnnnnnnnnnnnnnnnnnnnnnnnnnnnnnnnnnnnnnnnnnnnnnnnnnnnnnnnnnnnnnnnnnnnnnnnnnnnnnnnnnnnnnnnnnnnnnnnnnnnnnnnnnnnnnnnnnnnnnnnnnnnnnnnnnnnnnnnnnnnnnnnnnnnnnnnnnnnnnnnnnnnnnnnnnnnnnnnnnnnnnnnnnnnnnnnnnnnnnnnnnnnnnnnnnnnnnnnnnnnnnnnnnnnnnnnnnnnnnnnnnnnnnnnnnnnnnnnnnnnnnnnnnnnnnnnnnnnnnnnnnnnnnnnnnnnnnnnnnnnnnnnnnnnnnnnnnnnnnnnnnnnnnnnnnnnnnnnnnnnnnnnnnnnnnnnnnnnnnnnnnnnnnnnnnnnnnnnnnnnnnnnnnnnnnnnnnnnnnnnnnnnnnnnnnnnnnnnnnnnnnnnnnnnnnnnnnnnnnnnnnnnnnnnnnnnnnnnnnnnnnnnnnnnnnnnnnnnnnnnnnnnnnnnnnnnnnnnnnnnnnnnnnnnnnnnnnnnnnnnnnnnnnnnnnnnnnnnnnnnnnnnnnnnnnnnnnnnnnnnnnnnnnnnnnnnnnnnnnnnnnnnnnnnnnnnnnnnnnnnnnnnnnnnnnnnnnnnnnnnnnnnnnnnnnnnnnnnnnnnnnnnnnnnnnnnnnnnnnnnnnnnnnnnnnnnnnnnnnnnnnnnnnnnnnnnnnnnnnnnnnnnnnnnnnnnnnnnnnnnnnnnnnnnnnnnnnnnnnnnnnnnnnnnnnnnnnnnnnnnnnnnnnnnnnnnnnnnnnnnnnnnnnnnnnnnnnnnnnnnnnnnnnnnnnnnnnnnnnnnnnnnnnnnnnnnnnnnnnnnnnnnnnnnnnnnnnnnnnnnnnnnnnnnnnnnnnnnnnnnnnnnnnnnnnnnnnnnnnnnnnnnnnnnnnnnnnnnnnnnnnnnnnnnnnnnnnnnnnnnnnnnnnnnnnnnnnnnnnnnnnnnnnnnnnnnnnnnnnnnnnnnnnnnnnnnnnnnnnnnnnnnnnnnnnnnnnnnnnnnnnnnnnnnnnnnnnnnnnnnnnnnnnnnnnnnnnnnnnnnnnnnnnnnnnnnnnnnnnnnnnnnnnnnnnnnnnnnnnnnnnnnnnnnnnnnnnnnnnnnnnnnnnnnnnnnnnnnnnnnnnnnnnnnnnnnnnnnnnnnnnnnnnnnnnnnnnnnnnnnnnnnnnnnnnnnnnnnnnnnnnnnnnnnnnnnnnnnnnnnnnnnnnnnnnnnnnnnnnnnnnnnnnnnnnnnnnnnnnnnnnnnnnnnnnnnnnnnnnnnnnnnnnnnnnnnnnnnnnnnnnnnnnnnnnnnnnnnnnnnnnnnnnnnnnnnnnnnnnnnnnnnnnnnnnnnnnnnnnnnnnnnnnnnnnnnnnnnnnnnnnnnnnnnnnnnnnnnnnnnnnnnnnnnnnnnnnnnnnnnnnnnnnnnnnnnnnnnnnnnnnnnnnnnnnnnnnnnnnnnnnnnnnnnnnnnnnnnnnnnnnnnnnnnnnnnnnnnnnnnnnnnnnnnnnnnnnnnnnnnnnnnnnnnnnnnnnnnnnnnnnnnnnnnnnnnnnnnnnnnnnnnnnnnnnnnnnnnnnnnnnnnnnnnnnnnnnnnnnnnnnnnnnnnnnnnnnnnnnnnnnnnnnnnnnnnnnnnnnnnnnnnnnnnnnnnnnnnnnnnnnnnnnnnnnnnnnnnnnnnnnnnnnnnnnnnnnnnnnnnnnnnnnnnnnnnnnnnnnnnnnnnnnnnnnnnnnnnnnnnnnnnnnnnnnnnnnnnnnnnnnnnnnnnnnnnnnnnnnnnnnnnnnnnnnnnnnnnnnnnnnnnnnnnnnnnnnnnnnnnnnnnnnnnnnnnnnnnnnnnnnnnnnnnnnnnnnnnnnnnnnnnnnnnnnnnnnnnnnnnnnnnnnnnnnnnnnnnnnnnnnnnnnnnnnnnnnnnnnnnnnnnnnnnnnnnnnnnnnnnnnnnnnnnnnnnnnnnnnnnnnnnnnnnnnnnnnnnnnnnnnnnnnnnnnnnnnnnnnnnnnnnnnnnnnnnnnnnnnnnnnnnnnnnnnnnnnnnnnnnnnnnnnnnnnnnnnnnnnnnnnnnnnnnnnnnnnnnnnnnnnnnnnnnnnnnnnnnnnnnnnnnnnnnnnnnnnnnnnnnnnnnnnnnnnnnnnnnnnnnnnnnnnnnnnnnnnnnnnnnnnnnnnnnnnnnnnnnnnnnnnnnnnnnnnnnnnnnnnnnnnnnnnnnnnnnnnnnnnnnnnnnnnnnnnnnnnnnnnnnnnnnnnnnnnnnnnnnnnnnnnnnnnnnnnnnnnnnnnnnnnnnnnnnnnnnnnnnnnnnnnnnnnnnnnnnnnnnnnnnnnnnnnnnnnnnnnnnnnnnnnnnnnnnnnnnnnnnnnnnnnnnnnnnnnnnnnnnnnnnnnnnnnnnnnnnnnnnnnnnnnnnnnnnnnnnnnnnnnnnnnnnnnnnnnnnnnnnnnnnnnnnnnnnnnnnnnnnnnnnnnnnnnnnnnnnnnnnnnnnnnnnnnnnnnnnnnnnnnnnnnnnnnnnnnnnnnnnnnnnnnnnnnnnnnnnnnnnnnnnnnnnnnnnnnnnnnnnnnnnnnnnnnnnnnnnnnnnnnnnnnnnnnnnnnnnnnnnnnnnnnnnnnnnnnnnnnnnnnnnnnnnnnnnnnnnnnnnnnnnnnnnnnnnnnnnnnnnnnnnnnnnnnnnnnnnnnnnnnnnnnnnnnnnnnnnnnnnnnnnnnnnnnnnnnnnnnnnnnnnnnnnnnnnnnnnnnnnnnnnnnnnnnnnnnnnnnnnnnnnnnnnnnnnnnnnnnnnnnnnnnnnnnnnnnnnnnnnnnnnnnnnnnnnnnnnnnnnnnnnnnnnnnnnnnnnnnnnnnnnnnnnnnnnnnnnnnnnnnnnnnnnnnnnnnnnnnnnnnnnnnnnnnnnnnnnnnnnnnnnnnnnnnnnnnnnnnnnnnnnnnnnnnnnnnnnnnnnnnnnnnnnnnnnnnnnnnnnnnnnnnnnnnnnnnnnnnnnnnnnnnnnnnnnnnnnnnnnnnnnnnnnnnnnnnnnnnnnnnnnnnnnnnnnnnnnnnnnnnnnnnnnnnnnnnnnnnnnnnnnnnnnnnnnnnnnnnnnnnnnnnnnnnnnnnnnnnnnnnnnnnnnnnnnnnnnnnnnnnnnnnnnnnnnnnnnnnnnnnnnnnnnnnnnnnnnnnnnnnnnnnnnnnnnnnnnnnnnnnnnnnnnnnnnnnnnnnnnnnnnnnnnnnnnnnnnnnnnnnnnnnnnnnnnnnnnnnnnnnnnnnnnnnnnnnnnnnnnnnnnnnnnnnnnnnnnnnnnnnnnnnnnnnnnnnnnnnnnnnnnnnnnnnnnnnnnnnnnnnnnnnnnnnnnnnnnnnnnnnnnnnnnnnnnnnnnnnnnnnnnnnnnnnnnnnnnnnnnnnnnnnnnnnnnnnnnnnnnnnnnnnnnnnnnnnnnnnnnnnnnnnnnnnnnnnnnnnnnnnnnnnnnnnnnnnnnnnnnnnnnnnnnnnnnnnnnnnnnnnnnnnnnnnnnnnnnnnnnnnnnnnnnnnnnnnnnnnnnnnnnnnnnnnnnnnnnnnnnnnnnnnnnnnnnnnnnnnnnnnnnnnnnnnnnnnnnnnnnnnnnnnnnnnnnnnnnnnnnnnnnnnnnnnnnnnnnnnnnnnnnnnnnnnnnnnnnnnnnnnnnnnnnnnnnnnnnnnnnnnnnnnnnnnnnnnnnnnnnnnnnnnnnnnnnnnnnnnnnnnnnnnnnnnnnnnnnnnnnnnnnnnnnnnnnnnnnnnnnnnnnnnnnnnnnnnnnnnnnnnnnnnnnnnnnnnnnnnnnnnnnnnnnnnnnnnnnnnnnnnnnnnnnnnnnnnnnnnnnnnnnnnnnnnnnnnnnnnnnnnnnnnnnnnnnnnnnnnnnnnnnnnnnnnnnnnnnnnnnnnnnnnnnnnnnnnnnnnnnnnnnnnnnnnnnnnnnnnnnnnnnnnnnnnnnnnnnnnnnnnnnnnnnnnnnnnnnnnnnnnnnnnnnnnnnnnnnnnnnnnnnnnnnnnnnnnnnnnnnnnnnnnnnnnnnnnnnnnnnnnnnnnnnnnnnnnnnnnnnnnnnnnnnnnnnnnnnnnnnnnnnnnnnnnnnnnnnnnnnnnnnnnnnnnnnnnnnnnnnnnnnnnnnnnnnnnnnnnnnnnnnnnnnnnnnnnnnnnnnnnnnnnnnnnnnnnnnnnnnnnnnnnnnnnnnnnnnnnnnnnnnnnnnnnnnnnnnnnnnnnnnnnnnnnnnnnnnnnnnnnnnnnnnnnnnnnnnnnnnnnnnnnnnnnnnnnnnnnnnnnnnnnnnnnnnnnnnnnnnnnnnnnnnnnnnnnnnnnnnnnnnnnnnnnnnnnnnnnnnnnnnnnnnnnnnnnnnnnnnnnnnnnnnnnnnnnnnnnnnnnnnnnnnnnnnnnnnnnnnnnnnnnnnnnnnnnnnnnnnnnnnnnnnnnnnnnnnnnnnnnnnnnnnnnnnnnnnnnnnnnnnnnnnnnnnnnnnnnnnnnnnnnnnnnnnnnnnnnnnnnnnnnnnnnnnnnnnnnnnnnnnnnnnnnnnnnnnnnnnnnnnnnnnnnnnnnnnnnnnnnnnnnnnnnnnnnnnnnnnnnnnnnnnnnnnnnnnnnnnnnnnnnnnnnnnnnnnnnnnnnnnnnnnnnnnnnnnnnnnnnnnnnnnnnnnnnnnnnnnnnnnnnnnnnnnnnnnnnnnnnnnnnnnnnnnnnnnnnnnnnnnnnnnnnnnnnnnnnnnnnnnnnnnnnnnnnnnnnnnnnnnnnnnnnnnnnnnnnnnnnnnnnnnnnnnnnnnnnnnnnnnnnnnnnnnnnnnnnnnnnnnnnnnnnnnnnnnnnnnnnnnnnnnnnnnnnnnnnnnnnnnnnnnnnnnnnnnnnnnnnnnnnnnnnnnnnnnnnnnnnnnnnnnnnnnnnnnnnnnnnnnnnnnnnnnnnnnnnnnnnnnnnnnnnnnnnnnnnnnnnnnnnnnnnnnnnnnnnnnnnnnnnnnnnnnnnnnnnnnnnnnnnnnnnnnnnnnnnnnnnnnnnnnnnnnnnnnnnnnnnnnnnnnnnnnnnnnnnnnnnnnnnnnnnnnnnnnnnnnnnnnnnnnnnnnnnnnnnnnnnnnnnnnnnnnnnnnnnnnnnnnnnnnnnnnnnnnnnnnnnnnnnnnnnnnnnnnnnnnnnnnnnnnnnnnnnnnnnnnnnnnnnnnnnnnnnnnnnnnnnnnnnnnnnnnnnnnnnnnnnnnnnnnnnnnnnnnnnnnnnnnnnnnnnnnnnnnnnnnnnnnnnnnnnnnnnnnnnnnnnnnnnnnnnnnnnnnnnnnnnnnnnnnnnnnnnnnnnnnnnnnnnnnnnnnnnnnnnnnnnnnnnnnnnnnnnnnnnnnnnnnnnnnnnnnnnnnnnnnnnnnnnnnnnnnnnnnnnnnnnnnnnnnnnnnnnnnnnnnnnnnnnnnnnnnnnnnnnnnnnnnnnnnnnnnnnnnnnnnnnnnnnnnnnnnnnnnnnnnnnnnnnnnnnnnnnnnnnnnnnnnnnnnnnnnnnnnnnnnnnnnnnnnnnnnnnnnnnnnnnnnnnnnnnnnnnnnnnnnnnnnnnnnnnnnnnnnnnnnnnnnnnnnnnnnnnnnnnnnnnnnnnnnnnnnnnnnnnnnnnnnnnnnnnnnnnnnnnnnnnnnnnnnnnnnnnnnnnnnnnnnnnnnnnnnnnnnnnnnnnnnnnnnnnnnnnnnnnnnnnnnnnnnnnnnnnnnnnnnnnnnnnnnnnnnnnnnnnnnnnnnnnnnnnnnnnnnnnnnnnnnnnnnnnnnnnnnnnnnnnnnnnnnnnnnnnnnnnnnnnnnnnnnnnnnnnnnnnnnnnnnnnnnnnnnnnnnnnnnnnnnnnnnnnnnnnnnnnnnnnnnnnnnnnnnnnnnnnnnnnnnnnnnnnnnnnnnnnnnnnnnnnnnnnnnnnnnnnnnnnnnnnnnnnnnnnnnnnnnnnnnnnnnnnnnnnnnnnnnnnnnnnnnnnnnnnnnnnnnnnnnnnnnnnnnnnnnnnnnnnnnnnnnnnnnnnnnnnnnnnnnnnnnnnnnnnnnnnnnnnnnnnnnnnnnnnnnnnnnnnnnnnnnnnnnnnnnnnnnnnnnnnnnnnnnnnnnnnnnnnnnnnnnnnnnnnnnnnnnnnnnnnnnnnnnnnnnnnnnnnnnnnnnnnnnnnnnnnnnnnnnnnnnnnnnnnnnnnnnnnnnnnnnnnnnnnnnnnnnnnnnnnnnnnnnnnnnnnnnnnnnnnnnnnnnnnnnnnnnnnnnnnnnnnnnnnnnnnnnnnnnnnnnnnnnnnnnnnnnnnnnnnnnnnnnnnnnnnnnnnnnnnnnnnnnnnnnnnnnnnnnnnnnnnnnnnnnnnnnnnnnnnnnnnnnnnnnnnnnnnnnnnnnnnnnnnnnnnnnnnnnnnnnnnnnnnnnnnnnnnnnnnnnnnnnnnnnnnnnnnnnnnnnnnnnnnnnnnnnnnnnnnnnnnnnnnnnnnnnnnnnnnnnnnnnnnnnnnnnnnnnnnnnnnnnnnnnnnnnnnnnnnnnnnnnnnnnnnnnnnnnnnnnnnnnnnnnnnnnnnnnnnnnnnnnnnnnnnnnnnnnnnnnnnnnnnnnnnnnnnnnnnnnnnnnnnnnnnnnnnnnnnnnnnnnnnnnnnnnnnnnnnnnnnnnnnnnnnnnnnnnnnnnnnnnnnnnnnnnnnnnnnnnnnnnnnnnnnnnnnnnnnnnnnnnnnnnnnnnnnnnnnnnnnnnnnnnnnnnnnnnnnnnnnnnnnnnnnnnnnnnnnnnnnnnnnnnnnnnnnnnnnnnnnnnnnnnnnnnnnnnnnnnnnnnnnnnnnnnnnnnnnnnnnnnnnnnnnnnnnnnnnnnnnnnnnnnnnnnnnnnnnnnnnnnnnnnnnnnnnnnnnnnnnnnnnnnnnnnnnnnnnnnnnnnnnnnnnnnnnnnnnnnnnnnnnnnnnnnnnnnnnnnnnnnnnnnnnnnnnnnnnnnnnnnnnnnnnnnnnnnnnnnnnnnnnnnnnnnnnnnnnnnnnnnnnnnnnnnnnnnnnnnnnnnnnnnnnnnnnnnnnnnnnnnnnnnnnnnnnnnnnnnnnnnnnnnnnnnnnnnnnnnnnnnnnnnnnnnnnnnnnnnnnnnnnnnnnnnnnnnnnnnnnnnnnnnnnnnnnnnnnnnnnnnnnnnnnnnnnnnnnnnnnnnnnnnnnnnnnnnnnnnnnnnnnnnnnnnnnnnnnnnnnnnnnnnnnnnnnnnnnnnnnnnnnnnnnnnnnnnnnnnnnnnnnnnnnnnnnnnnnnnnnnnnnnnnnnnnnnnnnnnnnnnnnnnnnnnnnnnnnnnnnnnnnnnnnnnnnnnnnnnnnnnnnnnnnnnnnnnnnnnnnnnnnnnnnnnnnnnnnnnnnnnnnnnnnnnnnnnnnnnnnnnnnnnnnnnnnnnnnnnnnnnnnnnnnnnnnnnnnnnnnnnnnnnnnnnnnnnnnnnnnnnnnnnnnnnnnnnnnnnnnnnnnnnnnnnnnnnnnnnnnnnnnnnnnnnnnnnnnnnnnnnnnnnnnnnnnnnnnnnnnnnnnnnnnnnnnnnnnnnnnnnnnnnnnnnnnnnnnnnnnnnnnnnnnnnnnnnnnnnnnnnnnnnnnnnnnnnnnnnnnnnnnnnnnnnnnnnnnnnnnnnnnnnnnnnnnnnnnnnnnnnnnnnnnnnnnnnnnnnnnnnnnnnnnnnnnnnnnnnnnnnnnnnnnnnnnnnnnnnnnnnnnnnnnnnnnnnnnnnnnnnnnnnnnnnnnnnnnnnnnnnnnnnnnnnnnnnnnnnnnnnnnnnnnnnnnnnnnnnnnnnnnnnnnnnnnnnnnnnnnnnnnnnnnnnnnnnnnnnnnnnnnnnnnnnnnnnnnnnnnnnnnnnnnnnnnnnnnnnnnnnnnnnnnnnnnnnnnnnnnnnnnnnnnnnnnnnnnnnnnnnnnnnnnnnnnnnnnnnnnnnnnnnnnnnnnnnnnnnnnnnnnnnnnnnnnnnnnnnnnnnnnnnnnnnnnnnnnnnnnnnnnnnnnnnnnnnnnnnnnnnnnnnnnnnnnnnnnnnnnnnnnnnnnnnnnnnnnnnnnnnnnnnnnnnnnnnnnnnnnnnnnnnnnnnnnnnnnnnnnnnnnnnnnnnnnnnnnnnnnnnnnnnnnnnnnnnnnnnnnnnnnnnnnnnnnnnnnnnnnnnnnnnnnnnnnnnnnnnnnnnnnnnnnnnnnnnnnnnnnnnnnnnnnnnnnnnnnnnnnnnnnnnnnnnnnnnnnnnnnnnnnnnnnnnnnnnnnnnnnnnnnnnnnnnnnnnnnnnnnnnnnnnnnnnnnnnnnnnnnnnnnnnnnnnnnnnnnnnnnnnnnnnnnnnnnnnnnnnnnnnnnnnnnnnnnnnnnnnnnnnnnnnnnnnnnnnnnnnnnnnnnnnnnnnnnnnnnnnnnnnnnnnnnnnnnnnnnnnnnnnnnnnnnnnnnnnnnnnnnnnnnnnnnnnnnnnnnnnnnnnnnnnnnnnnnnnnnnnnnnnnnnnnnnnnnnnnnnnnnnnnnnnnnnnnnnnnnnnnnnnnnnnnnnnnnnnnnnnnnnnnnnnnnnnnnnnnnnnnnnnnnnnnnnnnnnnnnnnnnnnnnnnnnnnnnnnnnnnnnnnnnnnnnnnnnnnnnnnnnnnnnnnnnnnnnnnnnnnnnnnnnnnnnnnnnnnnnnnnnnnnnnnnnnnnnnnnnnnnnnnnnnnnnnnnnnnnnnnnnnnnnnnnnnnnnnnnnnnnnnnnnnnnnnnnnnnnnnnnnnnnnnnnnnnnnnnnnnnnnnnnnnnnnnnnnnnnnnnnnnnnnnnnnnnnnnnnnnnnnnnnnnnnnnnnnnnnnnnnnnnnnnnnnnnnnnnnnnnnnnnnnnnnnnnnnnnnnnnnnnnnnnnnnnnnnnnnnnnnnnnnnnnnnnnnnnnnnnnnnnnnnnnnnnnnnnnnnnnnnnnnnnnnnnnnnnnnnnnnnnnnnnnnnnnnnnnnnnnnnnnnnnnnnnnnnnnnnnnnnnnnnnnnnnnnnnnnnnnnnnnnnnnnnnnnnnnnnnnnnnnnnnnnnnnnnnnnnnnnnnnnnnnnnnnnnnnnnnnnnnnnnnnnnnnnnnnnnnnnnnnnnnnnnnnnnnnnnnnnnnnnnnnnnnnnnnnnnnnnnnnnnnnnnnnnnnnnnnnnnnnnnnnnnnnnnnnnnnnnnnnnnnnnnnnnnnnnnnnnnnnnnnnnnnnnnnnnnnnnnnnnnnnnnnnnnnnnnnnnnnnnnnnnnnnnnnnnnnnnnnnnnnnnnnnnnnnnnnnnnnnnnnnnnnnnnnnnnnnnnnnnnnnnnnnnnnnnnnnnnnnnnnnnnnnnnnnnnnnnnnnnnnnnnnnnnnnnnnnnnnnnnnnnnnnnnnnnnnnnnnnnnnnnnnnnnnnnnnnnnnnnnnnnnnnnnnnnnnnnnnnnnnnnnnnnnnnnnnnnnnnnnnnnnnnnnnnnnnnnnnnnnnnnnnnnnnnnnnnnnnnnnnnnnnnnnnnnnnnnnnnnnnnnnnnnnnnnnnnnnnnnnnnnnnnnnnnnnnnnnnnnnnnnnnnnnnnnnnnnnnnnnnnnnnnnnnnnnnnnnnnnnnnnnnnnnnnnnnnnnnnnnnnnnnnnnnnnnnnnnnnnnnnnnnnnnnnnnnnnnnnnnnnnnnnnnnnnnnnnnnnnnnnnnnnnnnnnnnnnnnnnnnnnnnnnnnnnnnnnnnnnnnnnnnnnnnnnnnnnnnnnnnnnnnnnnnnnnnnnnnnnnnnnnnnnnnnnnnnnnnnnnnnnnnnnnnnnnnnnnnnnnnnnnnnnnnnnnnnnnnnnnnnnnnnnnnnnnnnnnnnnnnnnnnnnnnnnnnnnnnnnnnnnnnnnnnnnnnnnnnnnnnnnnnnnnnnnnnnnnnnnnnnnnnnnnnnnnnnnnnnnnnnnnnnnnnnnnnnnnnnnnnnnnnnnnnnnnnnnnnnnnnnnnnnnnnnnnnnnnnnnnnnnnnnnnnnnnnnnnnnnnnnnnnnnnnnnnnnnnnnnnnnnnnnnnnnnnnnnnnnnnnnnnnnnnnnnnnnnnnnnnnnnnnnnnnnnnnnnnnnnnnnnnnnnnnnnnnnnnnnnnnnnnnnnnnnnnnnnnnnnnnnnnnnnnnnnnnnnnnnnnnnnnnnnnnnnnnnnnnnnnnnnnnnnnnnnnnnnnnnnnnnnnnnnnnnnnnnnnnnnnnnnnnnnnnnnnnnnnnnnnnnnnnnnnnnnnnnnnnnnnnnnnnnnnnnnnnnnnnnnnnnnnnnnnnnnnnnnnnnnnnnnnnnnnnnnnnnnnnnnnnnnnnnnnnnnnnnnnnnnnnnnnnnnnnnnnnnnnnnnnnnnnnnnnnnnnnnnnnnnnnnnnnnnnnnnnnnnnnnnnnnnnnnnnnnnnnnnnnnnnnnnnnnnnnnnnnnnnnnnnnnnnnnnnnnnnnnnnnnnnnnnnnnnnnnnnnnnnnnnnnnnnnnnnnnnnnnnnnnnnnnnnnnnnnnnnnnnnnnnnnnnnnnnnnnnnnnnnnnnnnnnnnnnnnnnnnnnnnnnnnnnnnnnnnnnnnnnnnnnnnnnnnnnnnnnnnnnnnnnnnnnnnnnnnnnnnnnnnnnnnnnnnnnnnnnnnnnnnnnnnnnnnnnnnnnnnnnnnnnnnnnnnnnnnnnnnnnnnnnnnnnnnnnnnnnnnnnnnnnnnnnnnnnnnnnnnnnnnnnnnnnnnnnnnnnnnnnnnnnnnnnnnnnnnnnnnnnnnnnnnnnnnnnnnnnnnnnnnnnnnnnnnnnnnnnnnnnnnnnnnnnnnnnnnnnnnnnnnnnnnnnnnnnnnnnnnnnnnnnnnnnnnnnnnnnnnnnnnnnnnnnnnnnnnnnnnnnnnnnnnnnnnnnnnnnnnnnnnnnnnnnnnnnnnnnnnnnnnnnnnnnnnnnnnnnnnnnnnnnnnnnnnnnnnnnnnnnnnnnnnnnnnnnnnnnnnnnnnnnnnnnnnnnnnnnnnnnnnnnnnnnnnnnnnnnnnnnnnnnnnnnnnnnnnnnnnnnnnnnnnnnnnnnnnnnnnnnnnnnnnnnnnnnnnnnnnnnnnnnnnnnnnnnnnnnnnnnnnnnnnnnnnnnnnnnnnnnnnnnnnnnnnnnnnnnnnnnnnnnnnnnnnnnnnnnnnnnnnnnnnnnnnnnnnnnnnnnnnnnnnnnnnnnnnnnnnnnnnnnnnnnnnnnnnnnnnnnnnnnnnnnnnnnnnnnnnnnnnnnnnnnnnnnnnnnnnnnnnnnnnnnnnnnnnnnnnnnnnnnnnnnnnnnnnnnnnnnnnnnnnnnnnnnnnnnnnnnnnnnnnnnnnnnnnnnnnnnnnnnnnnnnnnnnnnnnnnnnnnnnnnnnnnnnnnnnnnnnnnnnnnnnnnnnnnnnnnnnnnnnnnnnnnnnnnnnnnnnnnnnnnnnnnnnnnnnnnnnnnnnnnnnnnnnnnnnnnnnnnnnnnnnnnnnnnnnnnnnnnnnnnnnnnnnnnnnnnnnnnnnnnnnnnnnnnnnnnnnnnnnnnnnnnnnnnnnnnnnnnnnnnnnnnnnnnnnnnnnnnnnnnnnnnnnnnnnnnnnnnnnnnnnnnnnnnnnnnnnnnnnnnnnnnnnnnnnnnnnnnnnnnnnnnnnnnnnnnnnnnnnnnnnnnnnnnnnnnnnnnnnnnnnnnnnnnnnnnnnnnnnnnnnnnnnnnnnnnnnnnnnnnnnnnnnnnnnnnnnnnnnnnnnnnnnnnnnnnnnnnnnnnnnnnnnnnnnnnnnnnnnnnnnnnnnnnnnnnnnnnnnnnnnnnnnnnnnnnnnnnnnnnnnnnnnnnnnnnnnnnnnnnnnnnnnnnnnnnnnnnnnnnnnnnnnnnnnnnnnnnnnnnnnnnnnnnnnnnnnnnnnnnnnnnnnnnnnnnnnnnnnnnnnnnnnnnnnnnnnnnnnnnnnnnnnnnnnnnnnnnnnnnnnnnnnnnnnnnnnnnnnnnnnnnnnnnnnnnnnnnnnnnnnnnnnnnnnnnnnnnnnnnnnnnnnnnnnnnnnnnnnnnnnnnnnnnnnnnnnnnnnnnnnnnnnnnnnnnnnnnnnnnnnnnnnnnnnnnnnnnnnnnnnnnnnnnnnnnnnnnnnnnnnnnnnnnnnnnnnnnnnnnnnnnnnnnnnnnnnnnnnnnnnnnnnnnnnnnnnnnnnnnnnnnnnnnnnnnnnnnnnnnnnnnnnnnnnnnnnnnnnnnnnnnnnnnnnnnnnnnnnnnnnnnnnnnnnnnnnnnnnnnnnnnnnnnnnnnnnnnnnnnnnnnnnnnnnnnnnnnnnnnnnnnnnnnnnnnnnnnnnnnnnnnnnnnnnnnnnnnnnnnnnnnnnnnnnnnnnnnnnnnnnnnnnnnnnnnnnnnnnnnnnnnnnnnnnnnnnnnnnnnnnnnnnnnnnnnnnnnnnnnnnnnnnnnnnnnnnnnnnnnnnnnnnnnnnnnnnnnnnnnnnnnnnnnnnnnnnnnnnnnnnnnnnnnnnnnnnnnnnnnnnnnnnnnnnnnnnnnnnnnnnnnnnnnnnnnnnnnnnnnnnnnnnnnnnnnnnnnnnnnnnnnnnnnnnnnnnnnnnnnnnnnnnnnnnnnnnnnnnnnnnnnnnnnnnnnnnnnnnnnnnnnnnnnnnnnnnnnnnnnnnnnnnnnnnnnnnnnnnnnnnnnnnnnnnnnnnnnnnnnnnnnnnnnnnnnnnnnnnnnnnnnnnnnnnnnnnnnnnnnnnnnnnnnnnnnnnnnnnnnnnnnnnnnnnnnnnnnnnnnnnnnnnnnnnnnnnnnnnnnnnnnnnnnnnnnnnnnnnnnnnnnnnnnnnnnnnnnnnnnnnnnnnnnnnnnnnnnnnnnnnnnnnnnnnnnnnnnnnnnnnnnnnnnnnnnnnnnnnnnnnnnnnnnnnnnnnnnnnnnnnnnnnnnnnnnnnnnnnnnnnnnnnnnnnnnnnnnnnnnnnnnnnnnnnnnnnnnnnnnnnnnnnnnnnnnnnnnnnnnnnnnnnnnnnnnnnnnnnnnnnnnnnnnnnnnnnnnnnnnnnnnnnnnnnnnnnnnnnnnnnnnnnnnnnnnnnnnnnnnnnnnnnnnnnnnnnnnnnnnnnnnnnnnnnnnnnnnnnnnnnnnnnnnnnnnnnnnnnnnnnnnnnnnnnnnnnnnnnnnnnnnnnnnnnnnnnnnnnnnnnnnnnnnnnnnnnnnnnnnnnnnnnnnnnnnnnnnnnnnnnnnnnnnnnnnnnnnnnnnnnnnnnnnnnnnnnnnnnnnnnnnnnnnnnnnnnnnnnnnnnnnnnnnnnnnnnnnnnnnnnnnnnnnnnnnnnnnnnnnnnnnnnnnnnnnnnnnnnnnnnnnnnnnnnnnnnnnnnnnnnnnnnnnnnnnnnnnnnnnnnnnnnnnnnnnnnnnnnnnnnnnnnnnnnnnnnnnnnnnnnnnnnnnnnnnnnnnnnnnnnnnnnnnnnnnnnnnnnnnnnnnnnnnnnnnnnnnnnnnnnnnnnnnnnnnnnnnnnnnnnnnnnnnnnnnnnnnnnnnnnnnnnnnnnnnnnnnnnnnnnnnnnnnnnnnnnnnnnnnnnnnnnnnnnnnnnnnnnnnnnnnnnnnnnnnnnnnnnnnnnnnnnnnnnnnnnnnnnnnnnnnnnnnnnnnnnnnnnnnnnnnnnnnnnnnnnnnnnnnnnnnnnnnnnnnnnnnnnnnnnnnnnnnnnnnnnnnnnnnnnnnnnnnnnnnnnnnnnnnnnnnnnnnnnnnnnnnnnnnnnnnnnnnnnnnnnnnnnnnnnnnnnnnnnnnnnnnnnnnnnnnnnnnnnnnnnnnnnnnnnnnnnnnnnnnnnnnnnnnnnnnnnnnnnnnnnnnnnnnnnnnnnnnnnnnnnnnnnnnnnnnnnnnnnnnnnnnnnnnnnnnnnnnnnnnnnnnnnnnnnnnnnnnnnnnnnnnnnnnnnnnnnnnnnnnnnnnnnnnnnnnnnnnnnnnnnnnnnnnnnnnnnnnnnnnnnnnnnnnnnnnnnnnnnnnnnnnnnnnnnnnnnnnnnnnnnnnnnnnnnnnnnnnnnnnnnnnnnnnnnnnnnnnnnnnnnnnnnnnnnnnnnnnnnnnnnnnnnnnnnnnnnnnnnnnnnnnnnnnnnnnnnnnnnnnnnnnnnnnnnnnnnnnnnnnnnnnnnnnnnnnnnnnnnnnnnnnnnnnnnnnnnnnnnnnnnnnnnnnnnnnnnnnnnnnnnnnnnnnnnnnnnnnnnnnnnnnnnnnnnnnnnnnnnnnnnnnnnnnnnnnnnnnnnnnnnnnnnnnnnnnnnnnnnnnnnnnnnnnnnnnnnnnnnnnnnnnnnnnnnnnnnnnnnnnnnnnnnnnnnnnnnnnnnnnnnnnnnnnnnnnnnnnnnnnnnnnnnnnnnnnnnnnnnnnnnnnnnnnnnnnnnnnnnnnnnnnnnnnnnnnnnnnnnnnnnnnnnnnnnnnnnnnnnnnnnnnnnnnnnnnnnnnnnnnnnnnnnnnnnnnnnnnnnnnnnnnnnnnnnnnnnnnnnnnnnnnnnnnnnnnnnnnnnnnnnnnnnnnnnnnnnnnnnnnnnnnnnnnnnnnnnnnnnnnnnnnnnnnnnnnnnnnnnnnnnnnnnnnnnnnnnnnnnnnnnnnnnnnnnnnnnnnnnnnnnnnnnnnnnnnnnnnnnnnnnnnnnnnnnnnnnnnnnnnnnnnnnnnnnnnnnnnnnnnnnnnnnnnnnnnnnnnnnnnnnnnnnnnnnnnnnnnnnnnnnnnnnnnnnnnnnnnnnnnnnnnnnnnnnnnnnnnnnnnnnnnnnnnnnnnnnnnnnnnnnnnnnnnnnnnnnnnnnnnnnnnnnnnnnnnnnnnnnnnnnnnnnnnnnnnnnnnnnnnnnnnnnnnnnnnnnnnnnnnnnnnnnnnnnnnnnnnnnnnnnnnnnnnnnnnnnnnnnnnnnnnnnnnnnnnnnnnnnnnnnnnnnnnnnnnnnnnnnnnnnnnnnnnnnnnnnnnnnnnnnnnnnnnnnnnnnnnnnnnnnnnnnnnnnnnnnnnnnnnnnnnnnnnnnnnnnnnnnnnnnnnnnnnnnnnnnnnnnnnnnnnnnnnnnnnnnnnnnnnnnnnnnnnnnnnnnnnnnnnnnnnnnnnnnnnnnnnnnnnnnnnnnnnnnnnnnnnnnnnnnnnnnnnnnnnnnnnnnnnnnnnnnnnnnnnnnnnnnnnnnnnnnnnnnnnnnnnnnnnnnnnnnnnnnnnnnnnnnnnnnnnnnnnnnnnnnnnnnnnnnnnnnnnnnnnnnnnnnnnnnnnnnnnnnnnnnnnnnnnnnnnnnnnnnnnnnnnnnnnnnnnnnnnnnnnnnnnnnnnnnnnnnnnnnnnnnnnnnnnnnnnnnnnnnnnnnnnnnnnnnnnnnnnnnnnnnnnnnnnnnnnnnnnnnnnnnnnnnnnnnnnnnnnnnnnnnnnnnnnnnnnnnnnnnnnnnnnnnnnnnnnnnnnnnnnnnnnnnnnnnnnnnnnnnnnnnnnnnnnnnnnnnnnnnnnnnnnnnnnnnnnnnnnnnnnnnnnnnnnnnnnnnnnnnnnnnnnnnnnnnnnnnnnnnnnnnnnnnnnnnnnnnnnnnnnnnnnnnnnnnnnnnnnnnnnnnnnnnnnnnnnnnnnnnnnnnnnnnnnnnnnnnnnnnnnnnnnnnnnnnnnnnnnnnnnnnnnnnnnnnnnnnnnnnnnnnnnnnnnnnnnnnnnnnnnnnnnnnnnnnnnnnnnnnnnnnnnnnnnnnnnnnnnnnnnnnnnnnnnnnnnnnnnnnnnnnnnnnnnnnnnnnnnnnnnnnnnnnnnnnnnnnnnnnnnnnnnnnnnnnnnnnnnnnnnnnnnnnnnnnnnnnnnnnnnnnnnnnnnnnnnnnnnnnnnnnnnnnnnnnnnnnnnnnnnnnnnnnnnnnnnnnnnnnnnnnnnnnnnnnnnnnnnnnnnnnnnnnnnnnnnnnnnnnnnnnnnnnnnnnnnnnnnnnnnnnnnnnnnnnnnnnnnnnnnnnnnnnnnnnnnnnnnnnnnnnnnnnnnnnnnnnnnnnnnnnnnnnnnnnnnnnnnnnnnnnnnnnnnnnnnnnnnnnnnnnnnnnnnnnnnnnnnnnnnnnnnnnnnnnnnnnnnnnnnnnnnnnnnnnnnnnnnnnnnnnnnnnnnnnnnnnnnnnnnnnnnnnnnnnnnnnnnnnnnnnnnnnnnnnnnnnnnnnnnnnnnnnnnnnnnnnnnnnnnnnnnnnnnnnnnnnnnnnnnnnnnnnnnnnnnnnnnnnnnnnnnnnnnnnnnnnnnnnnnnnnnnnnnnnnnnnnnnnnnnnnnnnnnnnnnnnnnnnnnnnnnnnnnnnnnnnnnnnnnnnnnnnnnnnnnnnnnnnnnnnnnnnnnnnnnnnnnnnnnnnnnnnnnnnnnnnnnnnnnnnnnnnnnnnnnnnnnnnnnnnnnnnnnnnnnnnnnnnnnnnnnnnnnnnnnnnnnnnnnnnnnnnnnnnnnnnnnnnnnnnnnnnnnnnnnnnnnnnnnnnnnnnnnnnnnnnnnnnnnnnnnnnnnnnnnnnnnnnnnnnnnnnnnnnnnnnnnnnnnnnnnnnnnnnnnnnnnnnnnnnnnnnnnnnnnnnnnnnnnnnnnnnnnnnnnnnnnnnnnnnnnnnnnnnnnnnnnnnnnnnnnnnnnnnnnnnnnnnnnnnnnnnnnnnnnnnnnnnnnnnnnnnnnnnnnnnnnnnnnnnnnnnnnnnnnnnnnnnnnnnnnnnnnnnnnnnnnnnnnnnnnnnnnnnnnnnnnnnnnnnnnnnnnnnnnnnnnnnnnnnnnnnnnnnnnnnnnnnnnnnnnnnnnnnnnnnnnnnnnnnnnnnnnnnnnnnnnnnnnnnnnnnnnnnnnnnnnnnnnnnnnnnnnnnnnnnnnnnnnnnnnnnnnnnnnnnnnnnnnnnnnnnnnnnnnnnnnnnnnnnnnnnnnnnnnnnnnnnnnnnnnnnnnnnnnnnnnnnnnnnnnnnnnnnnnnnnnnnnnnnnnnnnnnnnnnnnnnnnnnnnnnnnnnnnnnnnnnnnnnnnnnnnnnnnnnnnnnnnnnnnnnnnnnnnnnnnnnnnnnnnnnnnnnnnnnnnnnnnnnnnnnnnnnnnnnnnnnnnnnnnnnnnnnnnnnnnnnnnnnnnnnnnnnnnnnnnnnnnnnnnnnnnnnnnnnnnnnnnnnnnnnnnnnnnnnnnnnnnnnnnnnnnnnnnnnnnnnnnnnnnnnnnnnnnnnnnnnnnnnnnnnnnnnnnnnnnnnnnnnnnnnnnnnnnnnnnnnnnnnnnnnnnnnnnnnnnnnnnnnnnnnnnnnnnnnnnnnnnnnnnnnnnnnnnnnnnnnnnnnnnnnnnnnnnnnnnnnnnnnnnnnnnnnnnnnnnnnnnnnnnnnnnnnnnnnnnnnnnnnnnnnnnnnnnnnnnnnnnnnnnnnnnnnnnnnnnnnnnnnnnnnnnnnnnnnnnnnnnnnnnnnnnnnnnnnnnnnnnnnnnnnnnnnnnnnnnnnnnnnnnnnnnnnnnnnnnnnnnnnnnnnnnnnnnnnnnnnnnnnnnnnnnnnnnnnnnnnnnnnnnnnnnnnnnnnnnnnnnnnnnnnnnnnnnnnnnnnnnnnnnnnnnnnnnnnnnnnnnnnnnnnnnnnnnnnnnnnnnnnnnnnnnnnnnnnnnnnnnnnnnnnnnnnnnnnnnnnnnnnnnnnnnnnnnnnnnnnnnnnnnnnnnnnnnnnnnnnnnnnnnnnnnnnnnnnnnnnnnnnnnnnnnnnnnnnnnnnnnnnnnnnnnnnnnnnnnnnnnnnnnnnnnnnnnnnnnnnnnnnnnnnnnnnnnnnnnnnnnnnnnnnnnnnnnnnnnnnnnnnnnnnnnnnnnnnnnnnnnnnnnnnnnnnnnnnnnnnnnnnnnnnnnnnnnnnnnnnnnnnnnnnnnnnnnnnnnnnnnnnnnnnnnnnnnnnnnnnnnnnnnnnnnnnnnnnnnnnnnnnnnnnnnnnnnnnnnnnnnnnnnnnnnnnnnnnnnnnnnnnnnnnnnnnnnnnnnnnnnnnnnnnnnnnnnnnnnnnnnnnnnnnnnnnnnnnnnnnnnnnnnnnnnnnnnnnnnnnnnnnnnnnnnnnnnnnnnnnnnnnnnnnnnnnnnnnnnnnnnnnnnnnnnnnnnnnnnnnnnnnnnnnnnnnnnnnnnnnnnnnnnnnnnnnnnnnnnnnnnnnnnnnnnnnnnnnnnnnnnnnnnnnnnnnnnnnnnnnnnnnnnnnnnnnnnnnnnnnnnnnnnnnnnnnnnnnnnnnnnnnnnnnnnnnnnnnnnnnnnnnnnnnnnnnnnnnnnnnnnnnnnnnnnnnnnnnnnnnnnnnnnnnnnnnnnnnnnnnnnnnnnnnnnnnnnnnnnnnnnnnnnnnnnnnnnnnnnnnnnnnnnnnnnnnnnnnnnnnnnnnnnnnnnnnnnnnnnnnnnnnnnnnnnnnnnnnnnnnnnnnnnnnnnnnnnnnnnnnnnnnnnnnnnnnnnnnnnnnnnnnnnnnnnnnnnnnnnnnnnnnnnnnnnnnnnnnnnnnnnnnnnnnnnnnnnnnnnnnnnnnnnnnnnnnnnnnnnnnnnnnnnnnnnnnnnnnnnnnnnnnnnnnnnnnnnnnnnnnnnnnnnnnnnnnnnnnnnnnnnnnnnnnnnnnnnnnnnnnnnnnnnnnnnnnnnnnnnnnnnnnnnnnnnnnnnnnnnnnnnnnnnnnnnnnnnnnnnnnnnnnnnnnnnnnnnnnnnnnnnnnnnnnnnnnnnnnnnnnnnnnnnnnnnnnnnnnnnnnnnnnnnnnnnnnnnnnnnnnnnnnnnnnnnnnnnnnnnnnnnnnnnnnnnnnnnnnnnnnnnnnnnnnnnnnnnnnnnnnnnnnnnnnnnnnnnnnnnnnnnnnnnnnnnnnnnnnnnnnnnnnnnnnnnnnnnnnnnnnnnnnnnnnnnnnnnnnnnnnnnnnnnnnnnnnnnnnnnnnnnnnnnnnnnnnnnnnnnnnnnnnnnnnnnnnnnnnnnnnnnnnnnnnnnnnnnnnnnnnnnnnnnnnnnnnnnnnnnnnnnnnnnnnnnnnnnnnnnnnnnnnnnnnnnnnnnnnnnnnnnnnnnnnnnnnnnnnnnnnnnnnnnnnnnnnnnnnnnnnnnnnnnnnnnnnnnnnnnnnnnnnnnnnnnnnnnnnnnnnnnnnnnnnnnnnnnnnnnnnnnnnnnnnnnnnnnnnnnnnnnnnnnnnnnnnnnnnnnnnnnnnnnnnnnnnnnnnnnnnnnnnnnnnnnnnnnnnnnnnnnnnnnnnnnnnnnnnnnnnnnnnnnnnnnnnnnnnnnnnnnnnnnnnnnnnnnnnnnnnnnnnnnnnnnnnnnnnnnnnnnnnnnnnnnnnnnnnnnnnnnnnnnnnnnnnnnnnnnnnnnnnnnnnnnnnnnnnnnnnnnnnnnnnnnnnnnnnnnnnnnnnnnnnnnnnnnnnnnnnnnnnnnnnnnnnnnnnnnnnnnnnnnnnnnnnnnnnnnnnnnnnnnnnnnnnnnnnnnnnnnnnnnnnnnnnnnnnnnnnnnnnnnnnnnnnnnnnnnnnnnnnnnnnnnnnnnnnnnnnnnnnnnnnnnnnnnnnnnnnnnnnnnnnnnnnnnnnnnnnnnnnnnnnnnnnnnnnnnnnnnnnnnnnnnnnnnnnnnnnnnnnnnnnnnnnnnnnnnnnnnnnnnnnnnnnnnnnnnnnnnnnnnnnnnnnnnnnnnnnnnnnnnnnnnnnnnnnnnnnnnnnnnnnnnnnnnnnnnnnnnnnnnnnnnnnnnnnnnnnnnnnnnnnnnnnnnnnnnnnnnnnnnnnnnnnnnnnnnnnnnnnnnnnnnnnnnnnnnnnnnnnnnnnnnnnnnnnnnnnnnnnnnnnnnnnnnnnnnnnnnnnnnnnnnnnnnnnnnnnnnnnnnnnnnnnnnnnnnnnnnnnnnnnnnnnnnnnnnnnnnnnnnnnnnnnnnnnnnnnnnnnnnnnnnnnnnnnnnnnnnnnnnnnnnnnnnnnnnnnnnnnnnnnnnnnnnnnnnnnnnnnnnnnnnnnnnnnnnnnnnnnnnnnnnnnnnnnnnnnnnnnnnnnnnnnnnnnnnnnnnnnnnnnnnnnnnnnnnnnnnnnnnnnnnnnnnnnnnnnnnnnnnnnnnnnnnnnnnnnnnnnnnnnnnnnnnnnnnnnnnnnnnnnnnnnnnnnnnnnnnnnnnnnnnnnnnnnnnnnnnnnnnnnnnnnnnnnnnnnnnnnnnnnnnnnnnnnnnnnnnnnnnnnnnnnnnnnnnnnnnnnnnnnnnnnnnnnnnnnnnnnnnnnnnnnnnnnnnnnnnnnnnnnnnnnnnnnnnnnnnnnnnnnnnnnnnnnnnnnnnnnnnnnnnnnnnnnnnnnnnnnnnnnnnnnnnnnnnnnnnnnnnnnnnnnnnnnnnnnnnnnnnnnnnnnnnnnnnnnnnnnnnnnnnnnnnnnnnnnnnnnnnnnnnnnnnnnnnnnnnnnnnnnnnnnnnnnnnnnnnnnnnnnnnnnnnnnnnnnnnnnnnnnnnnnnnnnnnnnnnnnnnnnnnnnnnnnnnnnnnnnnnnnnnnnnnnnnnnnnnnnnnnnnnnnnnnnnnnnnnnnnnnnnnnnnnnnnnnnnnnnnnnnnnnnnnnnnnnnnnnnnnnnnnnnnnnnnnnnnnnnnnnnnnnnnnnnnnnnnnnnnnnnnnnnnnnnnnnnnnnnnnnnnnnnnnnnnnnnnnnnnnnnnnnnnnnnnnnnnnnnnnnnnnnnnnnnnnnnnnnnnnnnnnnnnnnnnnnnnnnnnnnnnnnnnnnnnnnnnnnnnnnnnnnnnnnnnnnnnnnnnnnnnnnnnnnnnnnnnnnnnnnnnnnnnnnnnnnnnnnnnnnnnnnnnnnnnnnnnnnnnnnnnnnnnnnnnnnnnnnnnnnnnnnnnnnnnnnnnnnnnnnnnnnnnnnnnnnnnnnnnnnnnnnnnnnnnnnnnnnnnnnnnnnnnnnnnnnnnnnnnnnnnnnnnnnnnnnnnnnnnnnnnnnnnnnnnnnnnnnnnnnnnnnnnnnnnnnnnnnnnnnnnnnnnnnnnnnnnnnnnnnnnnnnnnnnnnnnnnnnnnnnnnnnnnnnnnnnnnnnnnnnnnnnnnnnnnnnnnnnnnnnnnnnnnnnnnnnnnnnnnnnnnnnnnnnnnnnnnnnnnnnnnnnnnnnnnnnnnnnnnnnnnnnnnnnnnnnnnnnnnnnnnnnnnnnnnnnnnnnnnnnnnnnnnnnnnnnnnnnnnnnnnnnnnnnnnnnnnnnnnnnnnnnnnnnnnnnnnnnnnnnnnnnnnnnnnnnnnnnnnnnnnnnnnnnnnnnnnnnnnnnnnnnnnnnnnnnnnnnnnnnnnnnnnnnnnnnnnnnnnnnnnnnnnnnnnnnnnnnnnnnnnnnnnnnnnnnnnnnnnnnnnnnnnnnnnnnnnnnnnnnnnnnnnnnnnnnnnnnnnnnnnnnnnnnnnnnnnnnnnnnnnnnnnnnnnnnnnnnnnnnnnnnnnnnnnnnnnnnnnnnnnnnnnnnnnnnnnnnnnnnnnnnnnnnnnnnnnnnnnnnnnnnnnnnnnnnnnnnnnnnnnnnnnnnnnnnnnnnnnnnnnnnnnnnnnnnnnnnnnnnnnnnnnnnnnnnnnnnnnnnnnnnnnnnnnnnnnnnnnnnnnnnnnnnnnnnnnnnnnnnnnnnnnnnnnnnnnnnnnnnnnnnnnnnnnnnnnnnnnnnnnnnnnnnnnnnnnnnnnnnnnnnnnnnnnnnnnnnnnnnnnnnnnnnnnnnnnnnnnnnnnnnnnnnnnnnnnnnnnnnnnnnnnnnnnnnnnnnnnnnnnnnnnnnnnnnnnnnnnnnnnnnnnnnnnnnnnnnnnnnnnnnnnnnnnnnnnnnnnnnnnnnnnnnnnnnnnnnnnnnnnnnnnnnnnnnnnnnnnnnnnnnnnnnnnnnnnnnnnnnnnnnnnnnnnnnnnnnnnnnnnnnnnnnnnnnnnnnnnnnnnnnnnnnnnnnnnnnnnnnnnnnnnnnnnnnnnnnnnnnnnnnnnnnnnnnnnnnnnnnnnnnnnnnnnnnnnnnnnnnnnnnnnnnnnnnnnnnnnnnnnnnnnnnnnnnnnnnnnnnnnnnnnnnnnnnnnnnnnnnnnnnnnnnnnnnnnnnnnnnnnnnnnnnnnnnnnnnnnnnnnnnnnnnnnnnnnnnnnnnnnnnnnnnnnnnnnnnnnnnnnnnnnnnnnnnnnnnnnnnnnnnnnnnnnnnnnnnnnnnnnnnnnnnnnnnnnnnnnnnnnnnnnnnnnnnnnnnnnnnnnnnnnnnnnnnnnnnnnnnnnnnnnnnnnnnnnnnnnnnnnnnnnnnnnnnnnnnnnnnnnnnnnnnnnnnnnnnnnnnnnnnnnnnnnnnnnnnnnnnnnnnnnnnnnnnnnnnnnnnnnnnnnnnnnnnnnnnnnnnnnnnnnnnnnnnnnnnnnnnnnnnnnnnnnnnnnnnnnnnnnnnnnnnnnnnnnnnnnnnnnnnnnnnnnnnnnnnnnnnnnnnnnnnnnnnnnnnnnnnnnnnnnnnnnnnnnnnnnnnnnnnnnnnnnnnnnnnnnnnnnnnnnnnnnnnnnnnnnnnnnnnnnnnnnnnnnnnnnnnnnnnnnnnnnnnnnnnnnnnnnnnnnnnnnnnnnnnnnnnnnnnnnnnnnnnnnnnnnnnnnnnnnnnnnnnnnnnnnnnnnnnnnnnnnnnnnnnnnnnnnnnnnnnnnnnnnnnnnnnnnnnnnnnnnnnnnnnnnnnnnnnnnnnnnnnnnnnnnnnnnnnnnnnnnnnnnnnnnnnnnnnnnnnnnnnnnnnnnnnnnnnnnnnnnnnnnnnnnnnnnnnnnnnnnnnnnnnnnnnnnnnnnnnnnnnnnnnnnnnnnnnnnnnnnnnnnnnnnnnnnnnnnnnnnnnnnnnnnnnnnnnnnnnnnnnnnnnnnnnnnnnnnnnnnnnnnnnnnnnnnnnnnnnnnnnnnnnnnnnnnnnnnnnnnnnnnnnnnnnnnnnnnnnnnnnnnnnnnnnnnnnnnnnnnnnnnnnnnnnnnnnnnnnnnnnnnnnnnnnnnnnnnnnnnnnnnnnnnnnnnnnnnnnnnnnnnnnnnnnnnnnnnnnnnnnnnnnnnnnnnnnnnnnnnnnnnnnnnnnnnnnnnnnnnnnnnnnnnnnnnnnnnnnnnnnnnnnnnnnnnnnnnnnnnnnnnnnnnnnnnnnnnnnnnnnnnnnnnnnnnnnnnnnnnnnnnnnnnnnnnnnnnnnnnnnnnnnnnnnnnnnnnnnnnnnnnnnnnnnnnnnnnnnnnnnnnnnnnnnnnnnnnnnnnnnnnnnnnnnnnnnnnnnnnnnnnnnnnnnnnnnnnnnnnnnnnnnnnnnnnnnnnnnnnnnnnnnnnnnnnnnnnnnnnnnnnnnnnnnnnnnnnnnnnnnnnnnnnnnnnnnnnnnnnnnnnnnnnnnnnnnnnnnnnnnnnnnnnnnnnnnnnnnnnnnnnnnnnnnnnnnnnnnnnnnnnnnnnnnnnnnnnnnnnnnnnnnnnnnnnnnnnnnnnnnnnnnnnnnnnnnnnnnnnnnnnnnnnnnnnnnnnnnnnnnnnnnnnnnnnnnnnnnnnnnnnnnnnnnnnnnnnnnnnnnnnnnnnnnnnnnnnnnnnnnnnnnnnnnnnnnnnnnnnnnnnnnnnnnnnnnnnnnnnnnnnnnnnnnnnnnnnnnnnnnnnnnnnnnnnnnnnnnnnnnnnnnnnnnnnnnnnnnnnnnnnnnnnnnnnnnnnnnnnnnnnnnnnnnnnnnnnnnnnnnnnnnnnnnnnnnnnnnnnnnnnnnnnnnnnnnnnnnnnnnnnnnnnnnnnnnnnnnnnnnnnnnnnnnnnnnnnnnnnnnnnnnnnnnnnnnnnnnnnnnnnnnnnnnnnnnnnnnnnnnnnnnnnnnnnnnnnnnnnnnnnnnnnnnnnnnnnnnnnnnnnnnnnnnnnnnnnnnnnnnnnnnnnnnnnnnnnnnnnnnnnnnnnnnnnnnnnnnnnnnnnnnnnnnnnnnnnnnnnnnnnnnnnnnnnnnnnnnnnnnnnnnnnnnnnnnnnnnnnnnnnnnnnnnnnnnnnnnnnnnnnnnnnnnnnnnnnnnnnnnnnnnnnnnnnnnnnnnnnnnnnnnnnnnnnnnnnnnnnnnnnnnnnnnnnnnnnnnnnnnnnnnnnnnnnnnnnnnnnnnnnnnnnnnnnnnnnnnnnnnnnnnnnnnnnnnnnnnnnnnnnnnnnnnnnnnnnnnnnnnnnnnnnnnnnnnnnnnnnnnnnnnnnnnnnnnnnnnnnnnnnnnnnnnnnnnnnnnnnnnnnnnnnnnnnnnnnnnnnnnnnnnnnnnnnnnnnnnnnnnnnnnnnnnnnnnnnnnnnnnnnnnnnnnnnnnnnnnnnnnnnnnnnnnnnnnnnnnnnnnnnnnnnnnnnnnnnnnnnnnnnnnnnnnnnnnnnnnnnnnnnnnnnnnnnnnnnnnnnnnnnnnnnnnnnnnnnnnnnnnnnnnnnnnnnnnnnnnnnnnnnnnnnnnnnnnnnnnnnnnnnnnnnnnnnnnnnnnnnnnnnnnnnnnnnnnnnnnnnnnnnnnnnnnnnnnnnnnnnnnnnnnnnnnnnnnnnnnnnnnnnnnnnnnnnnnnnnnnnnnnnnnnnnnnnnnnnnnnnnnnnnnnnnnnnnnnnnnnnnnnnnnnnnnnnnnnnnnnnnnnnnnnnnnnnnnnnnnnnnnnnnnnnnnnnnnnnnnnnnnnnnnnnnnnnnnnnnnnnnnnnnnnnnnnnnnnnnnnnnnnnnnnnnnnnnnnnnnnnnnnnnnnnnnnnnnnnnnnnnnnnnnnnnnnnnnnnnnnnnnnnnnnnnnnnnnnnnnnnnnnnnnnnnnnnnnnnnnnnnnnnnnnnnnnnnnnnnnnnnnnnnnnnnnnnnnnnnnnnnnnnnnnnnnnnnnnnnnnnnnnnnnnnnnnnnnnnnnnnnnnnnnnnnnnnnnnnnnnnnnnnnnnnnnnnnnnnnnnnnnnnnnnnnnnnnnnnnnnnnnnnnnnnnnnnnnnnnnnnnnnnnnnnnnnnnnnnnnnnnnnnnnnnnnnnnnnnnnnnnnnnnnnnnnnnnnnnnnnnnnnnnnnnnnnnnnnnnnnnnnnnnnnnnnnnnnnnnnnnnnnnnnnnnnnnnnnnnnnnnnnnnnnnnnnnnnnnnnnnnnnnnnnnnnnnnnnnnnnnnnnnnnnnnnnnnnnnnnnnnnnnnnnnnnnnnnnnnnnnnnnnnnnnnnnnnnnnnnnnnnnnnnnnnnnnnnnnnnnnnnnnnnnnnnnnnnnnnnnnnnnnnnnnnnnnnnnnnnnnnnnnnnnnnnnnnnnnnnnnnnnnnnnnnnnnnnnnnnnnnnnnnnnnnnnnnnnnnnnnnnnnnnnnnnnnnnnnnnnnnnnnnnnnnnnnnnnnnnnnnnnnnnnnnnnnnnnnnnnnnnnnnnnnnnnnnnnnnnnnnnnnnnnnnnnnnnnnnnnnnnnnnnnnnnnnnnnnnnnnnnnnnnnnnnnnnnnnnnnnnnnnnnnnnnnnnnnnnnnnnnnnnnnnnnnnnnnnnnnnnnnnnnnnnnnnnnnnnnnnnnnnnnnnnnnnnnnnnnnnnnnnnnnnnnnnnnnnnnnnnnnnnnnnnnnnnnnnnnnnnnnnnnnnnnnnnnnnnnnnnnnnnnnnnnnnnnnnnnnnnnnnnnnnnnnnnnnnnnnnnnnnnnnnnnnnnnnnnnnnnnnnnnnnnnnnnnnnnnnnnnnnnnnnnnnnnnnnnnnnnnnnnnnnnnnnnnnnnnnnnnnnnnnnnnnnnnnnnnnnnnnnnnnnnnnnnnnnnnnnnnnnnnnnnnnnnnnnnnnnnnnnnnnnnnnnnnnnnnnnnnnnnnnnnnnnnnnnnnnnnnnnnnnnnnnnnnnnnnnnnnnnnnnnnnnnnnnnnnnnnnnnnnnnnnnnnnnnnnnnnnnnnnnnnnnnnnnnnnnnnnnnnnnnnnnnnnnnnnnnnnnnnnnnnnnnnnnnnnnnnnnnnnnnnnnnnnnnnnnnnnnnnnnnnnnnnnnnnnnnnnnnnnnnnnnnnnnnnnnnnnnnnnnnnnnnnnnnnnnnnnnnnnnnnnnnnnnnnnnnnnnnnnnnnnnnnnnnnnnnnnnnnnnnnnnnnnnnnnnnnnnnnnnnnnnnnnnnnnnnnnnnnnnnnnnnnnnnnnnnnnnnnnnnnnnnnnnnnnnnnnnnnnnnnnnnnnnnnnnnnnnnnnnnnnnnnnnnnnnnnnnnnnnnnnnnnnnnnnnnnnnnnnnnnnnnnnnnnnnnnnnnnnnnnnnnnnnnnnnnnnnnnnnnnnnnnnnnnnnnnnnnnnnnnnnnnnnnnnnnnnnnnnnnnnnnnnnnnnnnnnnnnnnnnnnnnnnnnnnnnnnnnnnnnnnnnnnnnnnnnnnnnnnnnnnnnnnnnnnnnnnnnnnnnnnnnnnnnnnnnnnnnnnnnnnnnnnnnnnnnnnnnnnnnnnnnnnnnnnnnnnnnnnnnnnnnnnnnnnnnnnnnnnnnnnnnnnnnnnnnnnnnnnnnnnnnnnnnnnnnnnnnnnnnnnnnnnnnnnnnnnnnnnnnnnnnnnnnnnnnnnnnnnnnnnnnnnnnnnnnnnnnnnnnnnnnnnnnnnnnnnnnnnnnnnnnnnnnnnnnnnnnnnnnnnnnnnnnnnnnnnnnnnnnnnnnnnnnnnnnnnnnnnnnnnnnnnnnnnnnnnnnnnnnnnnnnnnnnnnnnnnnnnnnnnnnnnnnnnnnnnnnnnnnnnnnnnnnnnnnnnnnnnnnnnnnnnnnnnnnnnnnnnnnnnnnnnnnnnnnnnnnnnnnnnnnnnnnnnnnnnnnnnnnnnnnnnnnnnnnnnnnnnnnnnnnnnnnnnnnnnnnnnnnnnnnnnnnnnnnnnnnnnnnnnnnnnnnnnnnnnnnnnnnnnnnnnnnnnnnnnnnnnnnnnnnnnnnnnnnnnnnnnnnnnnnnnnnnnnnnnnnnnnnnnnnnnnnnnnnnnnnnnnnnnnnnnnnnnnnnnnnnnnnnnnnnnnnnnnnnnnnnnnnnnnnnnnnnnnnnnnnnnnnnnnnnnnnnnnnnnnnnnnnnnnnnnnnnnnnnnnnnnnnnnnnnnnnnnnnnnnnnnnnnnnnnnnnnnnnnnnnnnnnnnnnnnnnnnnnnnnnnnnnnnnnnnnnnnnnnnnnnnnnnnnnnnnnnnnnnnnnnnnnnnnnnnnnnnnnnnnnnnnnnnnnnnnnnnnnnnnnnnnnnnnnnnnnnnnnnnnnnnnnnnnnnnnnnnnnnnnnnnnnnnnnnnnnnnnnnnnnnnnnnnnnnnnnnnnnnnnnnnnnnnnnnnnnnnnnnnnnnnnnnnnnnnnnnnnnnnnnnnnnnnnnnnnnnnnnnnnnnnnnnnnnnnnnnnnnnnnnnnnnnnnnnnnnnnnnnnnnnnnnnnnnnnnnnnnnnnnnnnnnnnnnnnnnnnnnnnnnnnnnnnnnnnnnnnnnnnnnnnnnnnnnnnnnnnnnnnnnnnnnnnnnnnnnnnnnnnnnnnnnnnnnnnnnnnnnnnnnnnnnnnnnnnnnnnnnnnnnnnnnnnnnnnnnnnnnnnnnnnnnnnnnnnnnnnnnnnnnnnnnnnnnnnnnnnnnnnnnnnnnnnnnnnnnnnnnnnnnnnnnnnnnnnnnnnnnnnnnnnnnnnnnnnnnnnnnnnnnnnnnnnnnnnnnnnnnnnnnnnnnnnnnnnnnnnnnnnnnnnnnnnnnnnnnnnnnnnnnnnnnnnnnnnnnnnnnnnnnnnnnnnnnnnnnnnnnnnnnnnnnnnnnnnnnnnnnnnnnnnnnnnnnnnnnnnnnnnnnnnnnnnnnnnnnnnnnnnnnnnnnnnnnnnnnnnnnnnnnnnnnnnnnnnnnnnnnnnnnnnnnnnnnnnnnnnnnnnnnnnnnnnnnnnnnnnnnnnnnnnnnnnnnnnnnnnnnnnnnnnnnnnnnnnnnnnnnnnnnnnnnnnnnnnnnnnnnnnnnnnnnnnnnnnnnnnnnnnnnnnnnnnnnnnnnnnnnnnnnnnnnnnnnnnnnnnnnnnnnnnnnnnnnnnnnnnnnnnnnnnnnnnnnnnnnnnnnnnnnnnnnnnnnnnnnnnnnnnnnnnnnnnnnnnnnnnnnnnnnnnnnnnnnnnnnnnnnnnnnnnnnnnnnnnnnnnnnnnnnnnnnnnnnnnnnnnnnnnnnnnnnnnnnnnnnnnnnnnnnnnnnnnnnnnnnnnnnnnnnnnnnnnnnnnnnnnnnnnnnnnnnnnnnnnnnnnnnnnnnnnnnnnnnnnnnnnnnnnnnnnnnnnnnnnnnnnnnnnnnnnnnnnnnnnnnnnnnnnnnnnnnnnnnnnnnnnnnnnnnnnnnnnnnnnnnnnnnnnnnnnnnnnnnnnnnnnnnnnnnnnnnnnnnnnnnnnnnnnnnnnnnnnnnnnnnnnnnnnnnnnnnnnnnnnnnnnnnnnnnnnnnnnnnnnnnnnnnnnnnnnnnnnnnnnnnnnnnnnnnnnnnnnnnnnnnnnnnnnnnnnnnnnnnnnnnnnnnnnnnnnnnnnnnnnnnnnnnnnnnnnnnnnnnnnnnnnnnnnnnnnnnnnnnnnnnnnnnnnnnnnnnnnnnnnnnnnnnnnnnnnnnnnnnnnnnnnnnnnnnnnnnnnnnnnnnnnnnnnnnnnnnnnnnnnnnnnnnnnnnnnnnnnnnnnnnnnnnnnnnnnnnnnnnnnnnnnnnnnnnnnnnnnnnnnnnnnnnnnnnnnnnnnnnnnnnnnnnnnnnnnnnnnnnnnnnnnnnnnnnnnnnnnnnnnnnnnnnnnnnnnnnnnnnnnnnnnnnnnnnnnnnnnnnnnnnnnnnnnnnnnnnnnnnnnnnnnnnnnnnnnnnnnnnnnnnnnnnnnnnnnnnnnnnnnnnnnnnnnnnnnnnnnnnnnnnnnnnnnnnnnnnnnnnnnnnnnnnnnnnnnnnnnnnnnnnnnnnnnnnnnnnnnnnnnnnnnnnnnnnnnnnnnnnnnnnnnnnnnnnnnnnnnnnnnnnnnnnnnnnnnnnnnnnnnnnnnnnnnnnnnnnnnnnnnnnnnnnnnnnnnnnnnnnnnnnnnnnnnnnnnnnnnnnnnnnnnnnnnnnnnnnnnnnnnnnnnnnnnnnnnnnnnnnnnnnnnnnnnnnnnnnnnnnnnnnnnnnnnnnnnnnnnnnnnnnnnnnnnnnnnnnnnnnnnnnnnnnnnnnnnnnnnnnnnnnnnnnnnnnnnnnnnnnnnnnnnnnnnnnnnnnnnnnnnnnnnnnnnnnnnnnnnnnnnnnnnnnnnnnnnnnnnnnnnnnnnnnnnnnnnnnnnnnnnnnnnnnnnnnnnnnnnnnnnnnnnnnnnnnnnnnnnnnnnnnnnnnnnnnnnnnnnnnnnnnnnnnnnnnnnnnnnnnnnnnnnnnnnnnnnnnnnnnnnnnnnnnnnnnnnnnnnnnnnnnnnnnnnnnnnnnnnnnnnnnnnnnnnnnnnnnnnnnnnnnnnnnnnnnnnnnnnnnnnnnnnnnnnnnnnnnnnnnnnnnnnnnnnnnnnnnnnnnnnnnnnnnnnnnnnnnnnnnnnnnnnnnnnnnnnnnnnnnnnnnnnnnnnnnnnnnnnnnnnnnnnnnnnnnnnnnnnnnnnnnnnnnnnnnnnnnnnnnnnnnnnnnnnnnnnnnnnnnnnnnnnnnnnnnnnnnnnnnnnnnnnnnnnnnnnnnnnnnnnnnnnnnnnnnnnnnnnnnnnnnnnnnnnnnnnnnnnnnnnnnnnnnnnnnnnnnnnnnnnnnnnnnnnnnnnnnnnnnnnnnnnnnnnnnnnnnnnnnnnnnnnnnnnnnnnnnnnnnnnnnnnnnnnnnnnnnnnnnnnnnnnnnnnnnnnnnnnnnnnnnnnnnnnnnnnnnnnnnnnnnnnnnnnnnnnnnnnnnnnnnnnnnnnnnnnnnnnnnnnnnnnnnnnnnnnnnnnnnnnnnnnnnnnnnnnnnnnnnnnnnnnnnnnnnnnnnnnnnnnnnnnnnnnnnnnnnnnnnnnnnnnnnnnnnnnnnnnnnnnnnnnnnnnnnnnnnnnnnnnnnnnnnnnnnnnnnnnnnnnnnnnnnnnnnnnnnnnnnnnnnnnnnnnnnnnnnnnnnnnnnnnnnnnnnnnnnnnnnnnnnnnnnnnnnnnnnnnnnnnnnnnnnnnnnnnnnnnnnnnnnnnnnnnnnnnnnnnnnnnnnnnnnnnnnnnnnnnnnnnnnnnnnnnnnnnnnnnnnnnnnnnnnnnnnnnnnnnnnnnnnnnnnnnnnnnnnnnnnnnnnnnnnnnnnnnnnnnnnnnnnnnnnnnnnnnnnnnnnnnnnnnnnnnnnnnnnnnnnnnnnnnnnnnnnnnnnnnnnnnnnnnnnnnnnnnnnnnnnnnnnnnnnnnnnnnnnnnnnnnnnnnnnnnnnnnnnnnnnnnnnnnnnnnnnnnnnnnnnnnnnnnnnnnnnnnnnnnnnnnnnnnnnnnnnnnnnnnnnnnnnnnnnnnnnnnnnnnnnnnnnnnnnnnnnnnnnnnnnnnnnnnnnnnnnnnnnnnnnnnnnnnnnnnnnnnnnnnnnnnnnnnnnnnnnnnnnnnnnnnnnnnnnnnnnnnnnnnnnnnnnnnnnnnnnnnnnnnnnnnnnnnnnnnnnnnnnnnnnnnnnnnnnnnnnnnnnnnnnnnnnnnnnnnnnnnnnnnnnnnnnnnnnnnnnnnnnnnnnnnnnnnnnnnnnnnnnnnnnnnnnnnnnnnnnnnnnnnnnnnnnnnnnnnnnnnnnnnnnnnnnnnnnnnnnnnnnnnnnnnnnnnnnnnnnnnnnnnnnnnnnnnnnnnnnnnnnnnnnnnnnnnnnnnnnnnnnnnnnnnnnnnnnnnnnnnnnnnnnnnnnnnnnnnnnnnnnnnnnnnnnnnnnnnnnnnnnnnnnnnnnnnnnnnnnnnnnnnnnnnnnnnnnnnnnnnnnnnnnnnnnnnnnnnnnnnnnnnnnnnnnnnnnnnnnnnnnnnnnnnnnnnnnnnnnnnnnnnnnnnnnnnnnnnnnnnnnnnnnnnnnnnnnnnnnnnnnnnnnnnnnnnnnnnnnnnnnnnnnnnnnnnnnnnnnnnnnnnnnnnnnnnnnnnnnnnnnnnnnnnnnnnnnnnnnnnnnnnnnnnnnnnnnnnnnnnnnnnnnnnnnnnnnnnnnnnnnnnnnnnnnnnnnnnnnnnnnnnnnnnnnnnnnnnnnnnnnnnnnnnnnnnnnnnnnnnnnnnnnnnnnnnnnnnnnnnnnnnnnnnnnnnnnnnnnnnnnnnnnnnnnnnnnnnnnnnnnnnnnnnnnnnnnnnnnnnnnnnnnnnnnnnnnnnnnnnnnnnnnnnnnnnnnnnnnnnnnnnnnnnnnnnnnnnnnnnnnnnnnnnnnnnnnnnnnnnnnnnnnnnnnnnnnnnnnnnnnnnnnnnnnnnnnnnnnnnnnnnnnnnnnnnnnnnnnnnnnnnnnnnnnnnnnnnnnnnnnnnnnnnnnnnnnnnnnnnnnnnnnnnnnnnnnnnnnnnnnnnnnnnnnnnnnnnnnnnnnnnnnnnnnnnnnnnnnnnnnnnnnnnnnnnnnnnnnnnnnnnnnnnnnnnnnnnnnnnnnnnnnnnnnnnnnnnnnnnnnnnnnnnnnnnnnnnnnnnnnnnnnnnnnnnnnnnnnnnnnnnnnnnnnnnnnnnnnnnnnnnnnnnnnnnnnnnnnnnnnnnnnnnnnnnnnnnnnnnnnnnnnnnnnnnnnnnnnnnnnnnnnnnnnnnnnnnnnnnnnnnnnnnnnnnnnnnnnnnnnnnnnnnnnnnnnnnnnnnnnnnnnnnnnnnnnnnnnnnnnnnnnnnnnnnnnnnnnnnnnnnnnnnnnnnnnnnnnnnnnnnnnnnnnnnnnnnnnnnnnnnnnnnnnnnnnnnnnnnnnnnnnnnnnnnnnnnnnnnnnnnnnnnnnnnnnnnnnnnnnnnnnnnnnnnnnnnnnnnnnnnnnnnnnnnnnnnnnnnnnnnnnnnnnnnnnnnnnnnnnnnnnnnnnnnnnnnnnnnnnnnnnnnnnnnnnnnnnnnnnnnnnnnnnnnnnnnnnnnnnnnnnnnnnnnnnnnnnnnnnnnnnnnnnnnnnnnnnnnnnnnnnnnnnnnnnnnnnnnnnnnnnnnnnnnnnnnnnnnnnnnnnnnnnnnnnnnnnnnnnnnnnnnnnnnnnnnnnnnnnnnnnnnnnnnnnnnnnnnnnnnnnnnnnnnnnnnnnnnnnnnnnnnnnnnnnnnnnnnnnnnnnnnnnnnnnnnnnnnnnnnnnnnnnnnnnnnnnnnnnnnnnnnnnnnnnnnnnnnnnnnnnnnnnnnnnnnnnnnnnnnnnnnnnnnnnnnnnnnnnnnnnnnnnnnnnnnnnnnnnnnnnnnnnnnnnnnnnnnnnnnnnnnnnnnnnnnnnnnnnnnnnnnnnnnnnnnnnnnnnnnnnnnnnnnnnnnnnnnnnnnnnnnnnnnnnnnnnnnnnnnnnnnnnnnnnnnnnnnnnnnnnnnnnnnnnnnnnnnnnnnnnnnnnnnnnnnnnnnnnnnnnnnnnnnnnnnnnnnnnnnnnnnnnnnnnnnnnnnnnnnnnnnnnnnnnnnnnnnnnnnnnnnnnnnnnnnnnnnnnnnnnnnnnnnnnnnnnnnnnnnnnnnnnnnnnnnnnnnnnnnnnnnnnnnnnnnnnnnnnnnnnnnnnnnnnnnnnnnnnnnnnnnnnnnnnnnnnnnnnnnnnnnnnnnnnnnnnnnnnnnnnnnnnnnnnnnnnnnnnnnnnnnnnnnnnnnnnnnnnnnnnnnnnnnnnnnnnnnnnnnnnnnnnnnnnnnnnnnnnnnnnnnnnnnnnnnnnnnnnnnnnnnnnnnnnnnnnnnnnnnnnnnnnnnnnnnnnnnnnnnnnnnnnnnnnnnnnnnnnnnnnnnnnnnnnnnnnnnnnnnnnnnnnnnnnnnnnnnnnnnnnnnnnnnnnnnnnnnnnnnnnnnnnnnnnnnnnnnnnnnnnnnnnnnnnnnnnnnnnnnnnnnnnnnnnnnnnnnnnnnnnnnnnnnnnnnnnnnnnnnnnnnnnnnnnnnnnnnnnnnnnnnnnnnnnnnnnnnnnnnnnnnnnnnnnnnnnnnnnnnnnnnnnnnnnnnnnnnnnnnnnnnnnnnnnnnnnnnnnnnnnnnnnnnnnnnnnnnnnnnnnnnnnnnnnnnnnnnnnnnnnnnnnnnnnnnnnnnnnnnnnnnnnnnnnnnnnnnnnnnnnnnnnnnnnnnnnnnnnnnnnnnnnnnnnnnnnnnnnnnnnnnnnnnnnnnnnnnnnnnnnnnnnnnnnnnnnnnnnnnnnnnnnnnnnnnnnnnnnnnnnnnnnnnnnnnnnnnnnnnnnnnnnnnnnnnnnnnnnnnnnnnnnnnnnnnnnnnnnnnnnnnnnnnnnnnnnnnnnnnnnnnnnnnnnnnnnnnnnnnnnnnnnnnnnnnnnnnnnnnnnnnnnnnnnnnnnnnnnnnnnnnnnnnnnnnnnnnnnnnnnnnnnnnnnnnnnnnnnnnnnnnnnnnnnnnnnnnnnnnnnnnnnnnnnnnnnnnnnnnnnnnnnnnnnnnnnnnnnnnnnnnnnnnnnnnnnnnnnnnnnnnnnnnnnnnnnnnnnnnnnnnnnnnnnnnnnnnnnnnnnnnnnnnnnnnnnnnnnnnnnnnnnnnnnnnnnnnnnnnnnnnnnnnnnnnnnnnnnnnnnnnnnnnnnnnnnnnnnnnnnnnnnnnnnnnnnnnnnnnnnnnnnnnnnnnnnnnnnnnnnnnnnnnnnnnnnnnnnnnnnnnnnnnnnnnnnnnnnnnnnnnnnnnnnnnnnnnnnnnnnnnnnnnnnnnnnnnnnnnnnnnnnnnnnnnnnnnnnnnnnnnnnnnnnnnnnnnnnnnnnnnnnnnnnnnnnnnnnnnnnnnnnnnnnnnnnnnnnnnnnnnnnnnnnnnnnnnnnnnnnnnnnnnnnnnnnnnnnnnnnnnnnnnnnnnnnnnnnnnnnnnnnnnnnnnnnnnnnnnnnnnnnnnnnnnnnnnnnnnnnnnnnnnnnnnnnnnnnnnnnnnnnnnnnnnnnnnnnnnnnnnnnnnnnnnnnnnnnnnnnnnnnnnnnnnnnnnnnnnnnnnnnnnnnnnnnnnnnnnnnnnnnnnnnnnnnnnnnnnnnnnnnnnnnnnnnnnnnnnnnnnnnnnnnnnnnnnnnnnnnnnnnnnnnnnnnnnnnnnnnnnnnnnnnnnnnnnnnnnnnnnnnnnnnnnnnnnnnnnnnnnnnnnnnnnnnnnnnnnnnnnnnnnnnnnnnnnnnnnnnnnnnnnnnnnnnnnnnnnnnnnnnnnnnnnnnnnnnnnnnnnnnnnnnnnnnnnnnnnnnnnnnnnnnnnnnnnnnnnnnnnnnnnnnnnnnnnnnnnnnnnnnnnnnnnnnnnnnnnnnnnnnnnnnnnnnnnnnnnnnnnnnnnnnnnnnnnnnnnnnnnnnnnnnnnnnnnnnnnnnnnnnnnnnnnnnnnnnnnnnnnnnnnnnnnnnnnnnnnnnnnnnnnnnnnnnnnnnnnnnnnnnnnnnnnnnnnnnnnnnnnnnnnnnnnnnnnnnnnnnnnnnnnnnnnnnnnnnnnnnnnnnnnnnnnnnnnnnnnnnnnnnnnnnnnnnnnnnnnnnnnnnnnnnnnnnnnnnnnnnnnnnnnnnnnnnnnnnnnnnnnnnnnnnnnnnnnnnnnnnnnnnnnnnnnnnnnnnnnnnnnnnnnnnnnnnnnnnnnnnnnnnnnnnnnnnnnnnnnnnnnnnnnnnnnnnnnnnnnnnnnnnnnnnnnnnnnnnnnnnnnnnnnnnnnnnnnnnnnnnnnnnnnnnnnnnnnnnnnnnnnnnnnnnnnnnnnnnnnnnnnnnnnnnnnnnnnnnnnnnnnnnnnnnnnnnnnnnnnnnnnnnnnnnnnnnnnnnnnnnnnnnnnnnnnnnnnnnnnnnnnnnnnnnnnnnnnnnnnnnnnnnnnnnnnnnnnnnnnnnnnnnnnnnnnnnnnnnnnnnnnnnnnnnnnnnnnnnnnnnnnnnnnnnnnnnnnnnnnnnnnnnnnnnnnnnnnnnnnnnnnnnnnnnnnnnnnnnnnnnnnnnnnnnnnnnnnnnnnnnnnnnnnnnnnnnnnnnnnnnnnnnnnnnnnnnnnnnnnnnnnnnnnnnnnnnnnnnnnnnnnnnnnnnnnnnnnnnnnnnnnnnnnnnnnnnnnnnnnnnnnnnnnnnnnnnnnnnnnnnnnnnnnnnnnnnnnnnnnnnnnnnnnnnnnnnnnnnnnnnnnnnnnnnnnnnnnnnnnnnnnnnnnnnnnnnnnnnnnnnnnnnnnnnnnnnnnnnnnnnnnnnnnnnnnnnnnnnnnnnnnnnnnnnnnnnnnnnnnnnnnnnnnnnnnnnnnnnnnnnnnnnnnnnnnnnnnnnnnnnnnnnnnnnnnnnnnnnnnnnnnnnnnnnnnnnnnnnnnnnnnnnnnnnnnnnnnnnnnnnnnnnnnnnnnnnnnnnnnnnnnnnnnnnnnnnnnnnnnnnnnnnnnnnnnnnnnnnnnnnnnnnnnnnnnnnnnnnnnnnnnnnnnnnnnnnnnnnnnnnnnnnnnnnnnnnnnnnnnnnnnnnnnnnnnnnnnnnnnnnnnnnnnnnnnnnnnnnnnnnnnnnnnnnnnnnnnnnnnnnnnnnnnnnnnnnnnnnnnnnnnnnnnnnnnnnnnnnnnnnnnnnnnnnnnnnnnnnnnnnnnnnnnnnnnnnnnnnnnnnnnnnnnnnnnnnnnnnnnnnnnnnnnnnnnnnnnnnnnnnnnnnnnnnnnnnnnnnnnnnnnnnnnnnnnnnnnnnnnnnnnnnnnnnnnnnnnnnnnnnnnnnnnnnnnnnnnnnnnnnnnnnnnnnnnnnnnnnnnnnnnnnnnnnnnnnnnnnnnnnnnnnnnnnnnnnnnnnnnnnnnnnnnnnnnnnnnnnnnnnnnnnnnnnnnnnnnnnnnnnnnnnnnnnnnnnnnnnnnnnnnnnnnnnnnnnnnnnnnnnnnnnnnnnnnnnnnnnnnnnnnnnnnnnnnnnnnnnnnnnnnnnnnnnnnnnnnnnnnnnnnnnnnnnnnnnnnnnnnnnnnnnnnnnnnnnnnnnnnnnnnnnnnnnnnnnnnnnnnnnnnnnnnnnnnnnnnnnnnnnnnnnnnnnnnnnnnnnnnnnnnnnnnnnnnnnnnnnnnnnnnnnnnnnnnnnnnnnnnnnnnnnnnnnnnnnnnnnnnnnnnnnnnnnnnnnnnnnnnnnnnnnnnnnnnnnnnnnnnnnnnnnnnnnnnnnnnnnnnnnnnnnnnnnnnnnnnnnnnnnnnnnnnnnnnnnnnnnnnnnnnnnnnnnnnnnnnnnnnnnnnnnnnnnnnnnnnnnnnnnnnnnnnnnnnnnnnnnnnnnnnnnnnnnnnnnnnnnnnnnnnnnnnnnnnnnnnnnnnnnnnnnnnnnnnnnnnnnnnnnnnnnnnnnnnnnnnnnnnnnnnnnnnnnnnnnnnnnnnnnnnnnnnnnnnnnnnnnnnnnnnnnnnnnnnnnnnnnnnnnnnnnnnnnnnnnnnnnnnnnnnnnnnnnnnnnnnnnnnnnnnnnnnnnnnnnnnnnnnnnnnnnnnnnnnnnnnnnnnnnnnnnnnnnnnnnnnnnnnnnnnnnnnnnnnnnnnnnnnnnnnnnnnnnnnnnnnnnnnnnnnnnnnnnnnnnnnnnnnnnnnnnnnnnnnnnnnnnnnnnnnnnnnnnnnnnnnnnnnnnnnnnnnnnnnnnnnnnnnnnnnnnnnnnnnnnnnnnnnnnnnnnnnnnnnnnnnnnnnnnnnnnnnnnnnnnnnnnnnnnnnnnnnnnnnnnnnnnnnnnnnnnnnnnnnnnnnnnnnnnnnnnnnnnnnnnnnnnnnnnnnnnnnnnnnnnnnnnnnnnnnnnnnnnnnnnnnnnnnnnnnnnnnnnnnnnnnnnnnnnnnnnnnnnnnnnnnnnnnnnnnnnnnnnnnnnnnnnnnnnnnnnnnnnnnnnnnnnnnnnnnnnnnnnnnnnnnnnnnnnnnnnnnnnnnnnnnnnnnnnnnnnnnnnnnnnnnnnnnnnnnnnnnnnnnnnnnnnnnnnnnnnnnnnnnnnnnnnnnnnnnnnnnnnnnnnnnnnnnnnnnnnnnnnnnnnnnnnnnnnnnnnnnnnnnnnnnnnnnnnnnnnnnnnnnnnnnnnnnnnnnnnnnnnnnnnnnnnnnnnnnnnnnnnnnnnnnnnnnnnnnnnnnnnnnnnnnnnnnnnnnnnnnnnnnnnnnnnnnnnnnnnnnnnnnnnnnnnnnnnnnnnnnnnnnnnnnnnnnnnnnnnnnnnnnnnnnnnnnnnnnnnnnnnnnnnnnnnnnnnnnnnnnnnnnnnnnnnnnnnnnnnnnnnnnnnnnnnnnnnnnnnnnnnnnnnnnnnnnnnnnnnnnnnnnnnnnnnnnnnnnnnnnnnnnnnnnnnnnnnnnnnnnnnnnnnnnnnnnnnnnnnnnnnnnnnnnnnnnnnnnnnnnnnnnnnnnnnnnnnnnnnnnnnnnnnnnnnnnnnnnnnnnnnnnnnnnnnnnnnnnnnnnnnnnnnnnnnnnnnnnnnnnnnnnnnnnnnnnnnnnnnnnnnnnnnnnnnnnnnnnnnnnnnnnnnnnnnnnnnnnnnnnnnnnnnnnnnnnnnnnnnnnnnnnnnnnnnnnnnnnnnnnnnnnnnnnnnnnnnnnnnnnnnnnnnnnnnnnnnnnnnnnnnnnnnnnnnnnnnnnnnnnnnnnnnnnnnnnnnnnnnnnnnnnnnnnnnnnnnnnnnnnnnnnnnnnnnnnnnnnnnnnnnnnnnnnnnnnnnnnnnnnnnnnnnnnnnnnnnnnnnnnnnnnnnnnnnnnnnnnnnnnnnnnnnnnnnnnnnnnnnnnnnnnnnnnnnnnnnnnnnnnnnnnnnnnnnnnnnnnnnnnnnnnnnnnnnnnnnnnnnnnnnnnnnnnnnnnnnnnnnnnnnnnnnnnnnnnnnnnnnnnnnnnnnnnnnnnnnnnnnnnnnnnnnnnnnnnnnnnnnnnnnnnnnnnnnnnnnnnnnnnnnnnnnnnnnnnnnnnnnnnnnnnnnnnnnnnnnnnnnnnnnnnnnnnnnnnnnnnnnnnnnnnnnnnnnnnnnnnnnnnnnnnnnnnnnnnnnnnnnnnnnnnnnnnnnnnnnnnnnnnnnnnnnnnnnnnnnnnnnnnnnnnnnnnnnnnnnnnnnnnnnnnnnnnnnnnnnnnnnnnnnnnnnntaaatttaaagcgattctaggcttataactaatagaaaaacggtggtaaggtaaatgtatatatagtagaaaaatctcaatcaattctctaactctttaaaaataataatagtccagaaaatataacaatctaatagataacttagtaatcaaataaataaaacaaaatgaaaggatgtttttcgggcagaaaaccagcctagtcagtcacatgacccaactgtatcagggatgaaaaatgacagtattcatcctagattctgatagaaactaatagctacttctctaaagaaacagtatataaggataatatataggttataggttatataattaaaggaggctatataggtagtatatacagctcctacctagtccctagtcccctacgtaccttaatagatataatacctcaggtatcagccttcttagtactagggtcctaacaataggccgggctgggtcaggttaaaacaggctttagagaagtctagttataagcgagtaggcatatgaaagaggaagcgaaaaacatatagaaagtaagaagtatatgaagaagagagaaaatcaggatatagagcgaaaacgcgatatatacccgttatagacgaattcccactggctcgttttgtagggcggtatatactatatatgaaggcggtatacaggtagggctttagggggtgttgaaacttatgaacagtcactgtacggtttggatttaacggatatatggagatctcgaaacctaagtattatttatacgagtgatctcgccggcttacggccatcgagatagtcgttgccgagcaaagcgactgattctaacttctaatgctgcgcaaagcccccctcttactggcttattggtttcacagcgacccctcggctagagcaactcccctgcttttatcataattctaggagaaaacctggccacgtgaaatgtacgtaagaccttctgatttatacttgcttcgcttcaggagcatcccggagaattgaacaacggtaggcgggccgttcagtgtacgaatagggaatggacgcgttcatagagaggctgccccgtgtggctgataaatgataatgcaagttacaagagcggctctgcgatcgcgtgtcggtgtatgatgacatcactctatttatggataacgaaacagtttaggcgcctagcgcaggcagccattcaactacaacatatgactcaactttagacctcgggaaagaacatagatgagtcagatccaagttaccctataaatggaagtactcaagaaaggaagttatactttatgaaaagcgagcgcaaaagcaagaacagtatagcatgtaagaggcaagagggcaagaaggcaagaaagcaagaaatcaaagataaggatctacaccaatagatcacatggtacagggggggtcaacgctcgaaaatgattggctgacccctcctgcggctgatcctattaggtgattgcccgcatgggatgttgtcacatgtgaccggacttaggcaggaaaatcaggtcacattaaatccgaaagttaccgtaaccttacacaggctactagtagagattgggcatatctacaaaaccatgctggtaaatagatatcaacatcgagtaccggagaccaaccaaaaataccatggtatggtatcacccgagtacccaaatgatgagatcagctggtccttgccaaatgacgcccaagcacaatctttcccctccctcagatccccttttgcgctctgatgccctcccaactaaaccattttacagtgagtccattggtctcatgagtccctcccctggagaaactcggaatctccgttaagcgccaccccgcagtttatcatcacaccctcagccccatcccaactgactcacagttcgctttcaatattcccttcaacctgccctcccttttcttcttcctttcccccttacccttctcattttccatttggtccattctcgctcgatggactattaccctattcatcaaattgactcattcggccattggagccttaaccccgagacttaggtcatattggcttatcgccacctgagagagacaaagaggcagaccctgacaaatcacctgttttgcctggtgattcaacttccattgagttccataaacactcgctcatcagctttcgccatccatcttctcactctgcctggtgtattcatcccctcccctcctctttccagaaaacctagccctggacaccattgacacaccattgactactttaacctcttattaccaattaccgttggctcaacggtatttaatctggaatgacttcgtccgctggctggaaaccagccgaccagccgaccactatgcatcgtctcccatccgtttctagccttatgtcacccccagagaccaagcctctcgagagctttcctgtctcgctttcaccgtttgcaaagcctcgagattcttcaactcgtgacatacagcttccacccatctcagatgatcgaaaacggacccagtcagagatggacctcccgtcgccacctgtgactccgtacaccgggaacaagaagagcaatcccaacgcctcggaccagattgaaagggatttgggatcccccagggaccctgtccttttcccccctcaggattccggtactgacgttgctacggatgagccactgttcggccccgttcaccctccatctgcagaggcacttgtggaagagcacatgaattctcatatggcaatctttcgcaataagttgaacaaacccacacgggatgaatatctccttgcgctttcctgtgtccctattgtttcgactcagtacaatcgcaacccgggtgcttgggcccgagaggaacgcgagacgttggagcgccaaatggccatgatgaaccgttatcgatcaggagattacgagcccaagttgaagaagattgctcctgctccggtgaaaagactaggaacccaaccgcgcgtgcagcgaactcgggtcaaacgcacccctaaatccacacccaagcagcaggtgtttgataactttgaacccccccaaaccccgcttaccaaaccgcgtaccttgggtacgaatcgcgatgacaccgattatcactcactcaaggactactcgcccccggcagagacgctaggcagtaatgccaaagcattgaaggctgattggaaggggcagatgttagatttgagcaatgacccggacagaaatattctcagtcccgccgagctcaatctcgcatctaccctgagactttcatgtgcgacctatctatgcagcaaacgtcgaatttttgaagctcgagttcgagctctcggtgtgggcaaagagttccgtaagacggatgcccagcaggcttgcaagatcgatgtcaataaagccagcaaactttggaccgcctacgaacgcgtgggttggtttagagctgaatattttcataaatacctagcatgatattgcaggttacgtgtcttgatggtactgtggataattctgccagttcatcacagcccgtgtgtcgcctcccatcacaggctaggcactaactgaccttctacctcaagtgtctatcactggcagtacagccctcgactattaatccatatttgagtgctctcggctatctacacctgaccaagacaaacacccaagtgttccctagaatcaacccaccttatctcttggcctgtcgatttccttttcaattgctatctcgcttttacgactcatcatgacacattcttttcttttgagattccccccttgttggttttcttttcgttttgcatacaggccccatggctttgattatttccaactttggctgctggcgtttgggtgcttcacttcagtttcgctttggtctagaatggcaggcttggttacccacgggtgttttcttttcactattgcgattgaattttactgcttggtcgtttccttttctttcttcctttttcctcgtctttgttttggaaaggcagcaatagcacataggataaggcttgataccctgaccggatatggttttcctatattacaatgaattgatatgaaattgagcttaagatacaattcacaaaaaagatacatactagttaatatatctatcatctgtagttgacatgcccaattgatatgtttctaatttaaaccgaaataaagcggtggggcgcaatcgtaatcctccggcagcccggcgccaccttttttttgacgtatcccttgtatcatcttttgcttcactccaatctggatcatcaatttccctctttgaaataaccttagtcaaaagtaatgtctcagcaagtgactcgttctgggtccatcgaggaacaggaacgcgcaagggaggagggcgacaagaagccaaagtctcgccgaccagccagtaggtcctgggatctcatcaaccctctgtccacaactaactgtaccagatactgctttccgccagcaaagattgaaagcgtggcagtgagcttgagatttccgtatatctgcctatggagcaccatgctaacatctcactaggccaatcttaacccctaaaagcgttctacctctgtttttcatcgttggcattatctttgccccgattggcggtgttcttctctgggcaagctctctagtatgcttcgttttatacctttgcgtccttggcagaacagctctgacgagctacgtgctctaggtccaagaaatttccatcgattactccgagtgctccagcaaagcaccgaccgacagctatgcctccgttcctcattattccgcgaccttcaaatcttctacagcaatatcggcacccacctggcgaaagtccatcaatgagtcttcgggcaccgttacttgcactcttctttttgagatcccgaacgagcttccagcaccagttttcatgtattaccgcctcactaacttctatcaaaaccaccgccgatatgttcagtcgctcgatttgaatcagcttatcggagatgctgtctcctacaatacggtcaagggtggcgtatgtgacccattagcggtcaacaccacggctcagaaggtatactatccatgtggactgattgcgaactcattcttcaacgacactattgggaagccccaaatcctaaacccgaatgcacctgagaatgataaacaattctatgaaatgaccactaagggcattgcgtgggcgagtgataaggaactcatcaaaccgacaaagtacagtatggatgatgtactgccaccaccaaattggctttgggccagcgagaacggtgtctataaagaggatcccaacttacatgaaaatgaagctttcatggtttggatgaggaccgctggcttgccatcgttcagcaagctttcccgccgtaacgatacccatggcatgcctgctgcaagatattccattgacattgttgatcgtatgtgttaatactgccgcttacccatatcttactaaaattttcaggtttcaatgtcaccgaatacgatggaaccaagtcgatcttgatctccactcgaacagtgcttgggggcaagaaccccttcatgggaatcgcctatgtggttgttggtggaatctgcgttgttctcggggctttgtttactctcgcacatttggtgcgtccgaggtatgatctcctttctttgtgggcagaaactccaaactcctaacctacttactagaaaacttggcgaccacacctatcttacttgggactcaaatcagccgagcactgctatcgccacgggacgggataatgccccttgaaccccatcttcctgctctttgttcggcgttttttttttttttttttctgtttctgtttcaatatgccctgtaaataacccctgtgtttaatgacctcatcctcaactttctgacataccaatcgtttcattttcttgaatcctacgtgctcctagcccttgctcaagacatgcattcctcgcgagacacagcattcctgatgggatctggcaggctatatggtacccgcgaaccggtcggtcttgagattgatggttctttttttgactctttatccactccttctgtttttctcttttggaacaggtgtaaaaggggagttcaaaaccagggtttcttaacatcatggtgtgtcactcatttttccaactcgtcatcttcatcaccgttttcctgcaggcttggtgtagcccctttgcactccagaaaagaggcgcctgtgctaccgaagaccccggtgcaaatttcttgcatgaagtaaggcgcctccaatcggatgaagccgatcttgctatttcgcaggccaggaaggccccgatcgagatcgagacctggttccatatcatcagcagcaagtcggagtccacccaggtcactgataatatgatcaattctcaagtcagttgcttcttttctcgactggcatctcagtgctaattatttacctacagttttctattctacaacaatcttatgcagattctggcatctcctaccgattgcaaggtgtgactcgtaatgtcaatgataagtgggcgagcaatgcggatgatacggccatgaaaacgactctccgaaagggaagctaccgaacattgaacgtttacttccaaaccgatctgcaggcctcacccgaacaagcgggacgtgctttcgggcacaggggtgcagtcaccaacaatgatctggcatcaagcgttcttggattctgcactttgcccgatccgagtgtcaatgctagtagcccggcttctcaatatatcaaggatggctgcaatgttttggccaaaacaatgcctggtggctccttggatctgtacaatcgaggcgggactgccatccacgagattggacactggaatggccttttgcacaccttccagggggaatcttgctcagtagataatcctggtgaccacataagtgacacgccacagcagtccaccccgacagatgggtgccctgaccagaaggattcttgtccagactcccctggattggacgcggtccacgacttcatggattattcatccgatgtatgttatgagcgcttcacgcccggacaaggagagcgcatgcggagtatgtggatatccatgcgtgaaggtaaatagcgcaacagtgacgggcaataaggccaatacaagctctgtatggagtccattcgcagccatacatgtacacgcagaagccagccggccaggctagttggttacgattcagagaaataatacctgtctaatgagctgttggacgaatttcatgtatgaatatttggctacagtacagttgagaggcgttaagagactagtttcctcccaattaacaccataaatgtgtcttattctgatcccatccaccgtgggcccgagtcaaatcgtacaagtattcgaaaggcaatcaagagatgcaaggcattcgtagcccaacttggcttgcccatagattggaacatggagtacaagaaagggagggaagaaaaagtcattttgatgccccagcggcaaaaaaatggtcgattaccgcttgcgcttgatcccgcggtcattgtcttcatggtcggcctccttgtctttacgtttcgccttttcctcaagggcgtcccagtcctcaccactttcctcgtcgccactgaagtcttcttcgctggcatcggcactcgcgtcgtcatcaaattcgctgtcttcctcagaactctcgtccccagctgcaagctctgaatctgacaactcgaaagccgactcctcttcctcgtctgacccgttctcagagtctgattcggccgataagaaagaccatccaccatcggcaaagaagccgtatggatcgctgacaactgttttcataatcgtggtccaattcaggttgagcggaccctcggtgaacgcaatatcaacagaatcaagccagtccttaacaccctcaagtgcctcaacaggaatcgtgttgatatgaacgggagtccggcggaaatccttaaagacgaagaccatgtcgaagtttttgagtccaaactgcacagattagtaaaccaggctgatgaaatagtagaagtggtaatcattacctgaactctctccagatgggctatttcgatttcattcaatgtgacggtcgtgaaaggaggttcagtgagctgaactagggcatctgtggtgggttgaatcaagacattagaccggtttggaacgccggtaaagccaatttccctgaatgggatatcgacatcgacgccctcgtccttgccagcgtccgcaaccttctcggcaaatgccttgaactcgcggtccaatgcagctctccgccgtctttcctcctgttcagcctcaaattcttcctcatctccgtagcgatgtttgcgccgacggtttccagtttcatcaaattgcatttccgtggcctcgcgatagaattgaatatcctttgtcttccgctttccaatcatgatgggcgtcttgagatgcacatggataagaacgatcaattcatgggcacatggttggaagaacagatgcttcacattgctgaagagcacatcgacatgctcattgcggaaaggcgataggtaccggagaccattctgatgaatttcgacttctcccggaacacgcttcccatccaaaggaggccggagatagacgtcagggagtttcactggacgtcggtttctaatttcaaccagtttatcctgctcaacaacatcctccaattccttcttctcctgctctcgtctcagggccgtcttgcgaagttcggtgatatcctgggcaactcgtgcaagccggtcgttatccttggatcggagggtgagattgcgaacaaaatgagctgataggtcctcaaagggctggtcatcctttcggcccacaccctgacctggagacaggaagttgattcgtaggtaggcgtattccccttcgtcgcttttgctggcgttctttatggtgttgatatggaagggaactggtcggcccatgataggcacaatcacggttgaagtcttcaggtcgacgtaaactgtaaggtctttgaccttggcggggagttggttgtctcgcttgtaagactcaaagcgcttgaatttcttctgtgccaccccattatcgtctcccgtagtaccggtgaaccgatccaaaccttcctttgtcttcttcaaagccagctctttttggtgttcacgacgacgggcttcagctccctcattgacctgagttggtctttcagcacgaagtttggttcttgtgacgtttctgccagcagttgcgctagatttcgtctcctttttctctttaacaggcttctctggctcttcctcatccccgaagtagaatgagatcgagtccatgtcaataccggcgtctttggtaaaaatatgaggcccattttcgccgacacgaaccgtatcggtgatgaccatggaatatgcaccattcttggcattcttggagtctggatccttaacatcagtaagcccgatcgtgatagacagtgtcatgccgttcttcaagacgcggttgttcttggcattgaggaccatattagcatcccgcagctcgattccaatccctgcgccaacgttcttaacaaagtgtccctccagctccggcttcttagaccggacgagactcagtgctttgttgtaaacgtccttggcgaccacaccatctcgaacctctttcatggttgcttcatggaggctaagcagtagggcatagttcgcttcttgtgattttgttgggtcaaccagatatgtgcgcccaataagcgaactgtaggtcttgtatctgattccaaagctggacaaaatgataccgggctcgaggtttttattgtcgggagtcgctgtgagcttgagatcgtaggcacctccactttgaattacaggtccgtaggcccagtcaatttgctgggaatcgaattccgagggcagccgcgccagcttgttgaaaaatttcccatcatcaatctttgcatcaacctttgcggcgagggctttatgtgtcatcttcttttcctcgtcgagcaaacgtgacatctcatcgacgaagtactctgacataaggccactacaagctctggaagcattgcggattgagaccttttttgagactgtgtcagcaagcaccacccgtgaaacgcactgacatagaaaaactaaccaattcatcagaatctttgatcgcaaaagcagctgagagtgcaggtgctatgtcaacttcctccacctctttcgatatttctgcgaatgtgcgcttccattcatctgcgaagggtcctgaagctgtatttttgggtaaggtgccgactttattctgtagttattgcggttagagtaaggcaaatcgaaccggtgatttaaatgtcattttagctcacccctgcgcccttgataacatccaagcatttctcaaatgctttggtctttgattctgggtctttggtagtgaccagaatctccacgggaatctttccttcttttagcggctcaaggtgtttcgcttaaatttgatttaattagctatgtggcgcgcagaagtccatgtgttgataatcacctttcttggctgtggtgaccacgtaaatcgcctcagttgtgagaacaaatagtgtcgcagggaattcatacccgagaagccagaactaatcacgagttcataagtaacgatgttatgaagctcacgggccactgtgggacacggatagaaattttggaggtgattcacatacatgcatcgcgttgttcttctggaatgagttctcctcatcagtcttacccatcagaatgactatggaccctgcattgccaaatagggcattgcccgagcgcttgtcggccttccatgacgcatagaaactagacaggcggttgaaaaagttgttattgtcaatggcaatctcctcggccatggtgatggtctgatgtgagcaagatatgccacagtcagagactaagttgatggcaagagagcttggtggagaagcgcaggagctgttgtaggtatgtccgagtgctgaatttgttgaggatgaaggagagggaattaaggtagcatcaatgcgaccactgcgatgatgatagaccagacaccaatagaactaggttgtggaagaaaagacaaagacagaaagggacggcttaggggaaagtgaacgcgaaaagcgcgttcctgcactctaggtctctctatattaccgtatcaaagtattaccactttcatactagcgctgttttcatgtctctcgaatccgaacatgttttatgaatatctcttctcactgactttctttctatcttcaactttcaagttaacatggcgtatgtgagccttcacttggtcgtctaattagataacaaacaccctgtgatgctgccctcttttcccgcccacatcgcctgcgctttggaattcactatcgacattgagccagtctctctttgacaagcacccttttctacgatgtacactggctttttagttgtctgtaaacaatgaactctccgatagctcccatcctcctcgagcctcacctcggcgaacttcctggaagttcgcggagggtttttcgcaacgcagcnnnnnnnnnnnnnnnnnnnnnnnnnnnnnnnnnnnnnnnnnncatcctcctcgagcctcccctcggcgaacttcctggaagttcgcgaaggatttctcgcaacgatgcagctaccggagcatctgccgccggcgttcgcgctctcagtgcacagatggtggccttttacttcagagcaccgatcaaagctttctttcgtatgcgtgttgagtatgtagtatctatggacctgaagatctttgtattgacaatatttcacctagttatatggtaagaaacacgaccaacccatcaccagccttggttgcttatcatttgaaataggcatttgcgagagctgtgaacccacgtgtcgccgaaggcaaatggtctctgcatacgacaaccccgggattattgctccacgccgttcggacatatggctggcggtttatcccgaaccaagtgcttccaccattgatggcaaatgcagggtgacatataccagaggatatggccccaggtgattcaaaaacgctaacgatatagatcagggttggtgccgttctctacacgtcctatctccaagttttgggggccctacatgaacctgtgtcccaaggggtgaagcgagtatggcccccggctcctccatctgcaacattcgcagctggattcatagccggcacaattcagtcgattgtagccgcccctctggatgccttacaagttcgctttcaaaccaatgacatgctggagggtcagtaccggagtatgtggcattatggtcaccataagctcaaacagattggtctccgtggggtctttgcgggctggagcctgtcgttcatgcgggattcactcggctatgctgtgttcttctccacgttcgaatacatcaagtcacagtcctactattcattcgtcacttggtactatggctccctgcaagtcgatcatgtgggcatgctttcatcgtccaggtctagtgatcgtggtgtgccactcatcaagccccactatgcattggagccatgtttcctgctgatggccggtgttgtggcatcggtcgctcagcaaaccattcagcatcctataagtaggattcaagaccttcaccttggtcgtctggaatatctggatcaccaggccagcttcataccctcgcgacagaagatgatacaattctactaccatgcctatcaagagaccttcaagaggtgcgagcggaaggttgcgcgggccgggggctggcgctcctggttgttccgtggatttgtcgggagctctcttcgccaagtacctagcactagtgctggcctgatcatttttgaattggtgcgccgacggtacgcgaatcccgcagacgctgtccatattcagagtgatggatatgatatccttctcacttaatggcttatatgacaggtttttttccccctcgcgtcttttctgtttgttgtttgaacttttttatccttggtcattccgaagagggcgttacagacatagaatatgatttcattagacgtatatacatttatgtacatacaagcgataccctacttcataaatatcttcctggtaataagtagttaacgtaattcacatacgagccgccaccacatacgacccgccaccccatccaaaaacgcgtccatgaattagcacctagttaattcaaccacccaccatgccaccaaaacgctctcaatcctctaaagattcaatagagaaagagggtaggatcttattagctatccaggcttttaagaatcaagaattttccaatatttctactaccgcccgcacttttaacgtaccgcgttcaacccttcgggaccgcctcagtggtatacaacaccgcgcgacaataatacgcgacttctcgcgccaacttgactaaattaaccgcaattgaagaggaatctcttcgaaaatggataatctctatggattcttgtggatcggccccccggccctctatagtacgagaaatggcagatcttcttcttaaataacgcggaactaccccagttattttagttagctaaaattaggttatatattttattaaacggtaccctacccttatatcccgattcttaagacgttataattataagtgcgcgaaatgtaaagacctaaggattattagagagtggtttaatctagtttaaaaaactattctttagtatagaatcgatctagataatatttataactttaacgagacaggttttactataggattaactataatagcaaaagttataactagaagtaaatactacagttagagattacttttataacctagaaatcgcgagtaggtaactataattaaatgtataaatgcggtagggtaggcgcttcctctatatatgatttttaaaggcaaagtctttattaaatcttagttnnnnnnnnnnnnnnnnnnnnnnnnnnnnnnnnnnnnnnnnnnnnnnnnnnnnnnnnnnnnnnnnnnnnnnnnnnnnnnnnnnnnnnnnnnnnnnnnnnnnnnnnnnnnnnnnnnnnnnnnnnnnnnnnnnnnnnnnnnnnnnnnnnnnnnnnnnnnnnnnnnnnnnnnnnnnnntatattaataaactcgactttcttaaagtataccctactatataaattaaagcttttaaatcggagataattaaaaatagcttcttagcagctggtttagtaccctttttacctaatcgggtactttcgaagctaaatatctagcttcgaatacctaccccccctctgagccagggtagtgacttaagccggaattttatactaaaaacccctgctaccaggaaagatctatatcgataggctttgtcaatcaatgctttactttgtatataatctcgaagcctaataagtccttctaaacgtgcattaaaccaacttatcaaaggctgccaagttataatgtataatactattctactagcgaaagaaaataaggagttacaggatgaaaatgagaagaagaagtaaaaacggacccgatctagaaggcagatacccgccgaagaaggcctctctgttcaagaagcatctgtattaattatacagtaacaagaagcaattgaagcacctccccccagccccggcatgcctagagaatcgactattcaaccatgtacgcgcccctcccgggggtgtggaatatgcagattgccagggcatagaagagaaacatgtccagatagaccacttagttagttgatttaatttaatggcgttatggttgagataaatgcatttaaaaactagattgttgaatggggtggcgggtcgtatgtggtggcggctcgtatgtgaattacgttagttacttagttagttaactaacttagttatatgtattagtaacctatttgtcgatctatcccggattagacgggacgatacgatctagtacgtattagtactagtacgtactccgtatgcgtacagatcatcttctactactctggactagttattaggatggcttattctctcttctctctttcatacttctatttgacgaaaattactattctaacctagctcctcggaaaacacttgatgaaaatcatctgaatccctctgtcctattctatatttgacgttttggccgtgtaatactctcacttttttgcccaaacgcaccccctctccccaaatctccgcctgaccgtcaccccatttcgacggtacttcgtcatcttgcgtcgcgtgtgactttacgtagctagtcgcccgtggccacatcgcctgagtggcgccctatcacggactaatatagtggcttccaaggttgtgcccaggtggtaccgttgctgactccttgcggagaacgtcttatcgatatcattaattccatccgactccgcattcttttctccgggacaaagggctgcgaggttcagcccgtcaatatcgccatcatttctccgacttctccctcacgcgcctctaacatacccctccagtccataccctctgattctcgctcgatccattcggccaaattattggagtctaacgagaagggtaatcgacggtcttcccattcgtctgctcgctcggtcgggtctgacgtctccatctggtcagataccggtgacctcgccgagcagttcgctgaggctgaagatccgctacagattcaccttctcaattcctcagactgccggctcttgcgtcaaaaagagcgaagggagcagcccaaacacgtccgctacccttcaaacttgaacaacgagcgttctggcgtcgatattgaaaagatcaaaataccagcccctcccccgcgacatatttcgagagttgaacgcgtgctggccgccataatgacacccagagatggaccaaacacccagatgcacggcttagtcggaaaaccattactgtgagtgtcttaaaaggccaataccgtaatttttaccactgactctggtttgcatgtagttacttcacgagtgtgtttgtatcactgggtgtctttctctttggctatgaccagggtgtaatgtctgggatcataacgttcgtgtctaatccctcgagcatagactcgccataaagataacgaggagcggaatgtggctaacagatacagtggctggtacttcaaagattacttcaaccagccttctcgggctacaattggcactgtggttgcagttctcgaaattggtgcattcatatcctcgctccttgtgggtcgtatcggtgatgtgatcggccgtcgaaggactatactctatggctccattgtgttctttgttggcggtgcttttcaaacattttccacgggtatacccatgatgatggtcggtcgtgtgattgccggtctaggcgttggtgccctctctactatcgtgccagtttaccagtctgaaatatcggtttgtactcccatttctccatcaatcctcaaggctttttctttgtctccctccccattctatcgccaggtacgctgacgaattttaagcctccccacaaccgtgggaagcttgcatgcatcgaattcaccggcaatattgctgggtatgcgactagtgtgtgggtagactatttctgtagcttcatcgataacgactactcctggcgcctgccgcttcttttccagtgtatcatgggtgccttacttggagttggcagtctgatgatctgtgaatcacctaggtgagtagaaatcccatccattgtctgctaaggctaactcccaatcctttccttaggtggcttcttgataatgaccacgacgaggagggtatggtggtgatcgcaaatctttatggcgaaggcgatctcctcaatgacaaggcccgtcaagaatatcgtgagatcaagatgaatgtccttgtccagcgacaagagggtgagcgatcctactcggacatgttccgccggtatcgcaaacgtgttttgattgctatgtcggcccaagctttagctcaactcaacgggatcaacgtaatctcatactatgcgcctctagtgtttgaatcggtatggacctagagtctccctccatggtgctatgccggatacaaataatattcaaaagggttcaggattatgctgaccaatctaccatataggccggttgggctggacgggatgccatcctgatgactggaatcaatggtatttcatacttgctgtctaccataccaccctggtatctcgtggatggctggggccggcgaccgattttactcacgggtgccgttgccatgctcatttcgctttctcttatctcctactttatttacatcgagattcccgccaccccaaccctgacggtgatcttcgttatgctctataatgcagctttcggggcatcctggggccccattccatggttatatcccccagagattttgcctttgagtattcgtgccaaaggtgcaagtttgagcaccgcttcaaattgggcattcaattggctcgtgggcgaggtaacacctgttcttcaagaagttatcaagtggcggctatacttggtccatgcattcttttgtgcatgcagttttgtgcttggtagggtccctcatccgtggtcatctactagggaccatcatactgactatcaccacagtctattttttgtaccccgaaacgagtggggttcgcctcgaagatatgaacgttctttttggcgatgcttccactgccatgccaacacccgccacccaaggcgaacgggggtcgctaatgggtgctggttcacccgtcccatcgctcgacctgcgtcggcagtatggtcaatttggggcagataattccatccctggcctagatattgatccgccgacttcaagccacgagggaactagcaaacgcggacgctcaaattctcaccagggcagtgtccgcggcgaaggaattggtggctggatctcaaacatggtcagtcgaaaccgaggagcgggcgccggtgctaccagcagtcaatatagacgtttggagcaaggagaaggcgaatgaaatatttacgggtaattgtggccttggactggatagaggaagcaagaaaagaccaaagaatccgatgttatatatctcctttccccatctaccaatgccttctgttgatctcgagttcacgttcacggtatatacctatcatacgaggctttgcattgatgttgttctggaattttcttgttacatatgtgtctgtgccaatgatttttatatatatataaataaaatatctagttataatacatgtactataaatgattggtatatttatagcacggagctagaattacaagggccaatgttctgaaaacggcccgctaaaagtggacttgtttatcctccctgaggccacggatctcactttctccttgattccctcagcccactctcttgtctcacttcacttcacttcacttcatttcatttcatttcgttttctttttctttttctttttcaatctacttctggcattgcttccggtttatccgctagatttgcccccattctatcactcacttacccaggggaatggctatgttctcttaaatctatctgtccttctattaccggtctacctcggtattccccagtttaatttcttactattctcgcattttgttggtacattttctttcgaaaattctacaagacacacacacacacactatggtgggcctagacactgccgtgagcacgggtgccaaccatgagtccgacctccgtcgaagaaatgtccctgatattagcaaagttcatctggactccaatcggacgaatgacgaagatgtgaagaaagctagaacacaggtgaggtagccttcttgaacatcatcatccacgcccttctaacctcccctgaacagtcaccctcgttcctccatgtgctagctaactgggagccgatcattgctcccatcctcttgactgccctcgcactcttcacccgcctgtaccagatcggccgttccaacattgttacctgggacgaggcccacttcggtaaattcggttcccactatctcaaacgcgaattctacttcgatgtccacccgcctttggggaagatgctagttggcctatccggatatcttgctggctataatgggtcttttgaattcaagtctggcgagaagtatccagaagatgtgaattatacctttatgcgggccttcaatgctgcctttggtataatctgcattcccctggcctactacactgcgcgagagttgaacttccgtcggcccacagtctggctgatcagcctgatggtgctgtgtgagaattcctatgcaacaatttctcggtttatacttctcgactcgatgctgctctgcttcacatttactacgacgatgtgctgggcaagatttcaccggttgcagcgtgatagcttttcgctagaatggtatgcctggctctgtttaaccggtttgagcattgggtgtgtctgtagtgtcaaatgggtcggtttcttttgcactgctcttgtcggtctctatactattgatgacctgtggaataaatttggcgacctaaagatgccacgggtgagtacctgctatcagccccccttgcctagaaggtgatcaccgattagctggctaatgcggacgtgtttggacaggctgtactcgcaaagcacttggttgctcgtgttgtcggattgattgttattccgatcttggtctacatgttttctttttatctgcacttcttagtgctggcgaacagtggtccaggtgatgcccagatgagctcgctttttcaagccaacctacaaggcactgaagttggtagagatagccctcttgaactcgcaattgggtcgcgtgtcacacttaaaaatatgggatacggaggagggcttctgcactctcacgttcaaacttacccggagggatctatgcagcagcaggtcacctgctaccaccacaaagatgccaataatgactggttcatctaccccaatcgacaggagccggactacgatgccactgctgatctgcggttcgttggtgatggcgatgtcattcggttgattcacggacagacaggtcgtaacctgcattcccatgctatcccagcaccaatcaccaaatcacaccacgaagtgtcatcttacggaaatatcaccatcggagacgacaaagaccactggaaagtggaggtagtcgatgatgttgcatcttgggaccgatctaggatccggacactcacaacagcattccgactccgccaccctgtcctgggctgctatctacgggcaggaaatgtcaatctacctcaatggggcttcaagcagattgaaacaacgtgtaccaaggaaaacaaacccggcgatgtgtatactcactggaatgttgagtctcacaccaacgaccgttgtaagcttatccttttgccaaacacttgatattgatgagcccaatcagacttattgacctatccacagtgccccctggtgaccctggctcctataaatcgcccttcttgaaggacttcatccacctgaatgtggccatgatgacctctaacaatgctctggttcccgatcctgacaagcaagatgacttggcttccaagttttggcagtggccgattctcaatgtcggcttgcgcatgtgttcttgggatgatagcgttgtcaaatactatctgctaggaaaccccctagtctattggggaagcactgccgctcttggtggatttggtcttcttttcatttggtaccttctgcgctggcagagggggtacaatgatctcagcaacgaggaaattagtcacatccactactctggcatatacccagttatcggatgggtcttgcactatcttccctttatcatcatggcccgcgtcacttatgtccatcattactatccggctctctactatgccatcctgaacttcggcttctgcgttgattgggtaacacgcaagatgaaccccagattgtctgcagcggtgtatgctttcctctacgtggttattgtcggattgttcattcatttccgagccatcgtgtttggaatggagggttctaaccagcaatggagtcatctccgctggctacccggatggaaaatggcgaatgtgaactaatcatggatcgtttgatgacttgttctcgtcctctctgcttgttagcttgtgttgactaccccaaagtggaccttatatgcctacaggtaattgtatcaacccggacaattcaactttacttctgtatttgtaaagaaaaatgcaatgttatcagagatactagagtcttcatttcgatcgttatagccacgcttagtgtctggtaacaacttagttcaatagtgatgaagatgtgtccgggccagatgttgctgactatttattattacgggctgtggatttagcaacatcccccggtccaactgttgccacctttgcgcatagcatcatccattcccaatgtgacggttctagggatgcccgtgtttgctcctcccgaggctccgaaccctttcacaccgcttcgccgatcattgaggtcgtattttcccgtttcaatgttacgatagatcctctcagcaacttccaggaacgctcgttcaacgccatccccagatttggcgctcgtttcaacatagcgaaccacattgttcaagcggcaccattcttcggcctcctcctgggtgacctgcctttgatttgatccagaactggcccccgtcagatcagtcttattaccgaccaaaataacaacgatgccatcttctgcaatatgccgtagatcctgcagccactgagtgcaagatataaaggtcgagtgtctggatatatcaaagactaggagagcgccagaggcaccccggaagtaagagcgggtgatagacttgtatgtctcttgtccagcagtatcccacagtgatagtttcatgcgcttttgattgggggaaccttgtggttttcgtggaggggtaggaagaccagaggtggtagacgcttctggaaatgtatcacccgacgatccggtagagggctcatcaagttctagctccagtgaagctggaggaccaactggcacaattcgcgacccgaactcgacaccaatggtcacatcatgagatggggaaaaacggccttcacaaagtcggacggtgagctattgttcagttagcgtaggtccaaggtccaaggctgatagcacttacgctggacttgccagtgccagagtcaccaatgcagacaagcttagcaatataatcccatggctgtgacatggagagagtagaaaaaaatccagaatcagaaatggggaaagaaagcgaaggtcagtttacctacgacgtatgtcgatttggagacctcatggttatcagctgagtcatctatcaagcctgacgtgcccgaatgacgctttcatcagctgcgtgaccctagcccttcaccttatcccaggcaccacacacatcctctctcctagatttggcatatctcaaacaaattcaaagtctttcctcttaccctctcttccctttactctctaatatccgaccgtacttgatttcctcgacatatttcctttagtgatctatcactggtcctgtcccactcaccgtactttcttcgttacgataacaggccatgttctctgaatgtaagaactggaagatcctgagtattagaagactatatggctaacacttcgctttagatgcctcccgattccttgctcagtcacagtcacgagtaacctctcgaccagatgaggttcaaagaacgggccgtagccgccctggtcaacatcaaggcaaccctcgacacccctcatcgcgctccttcttacgacctaccgatccttatcgaccgggtgcatcccagacagctcaatttccttttgcccctcgcagctcggttcaacaagctcccctcttcttcagtgccactgatgagttccgagaggaagatgacgaaacagaacgtgagcgagaaatagctgatttctatgcactccaacgatcaaggcggcattttggcgacagcaacttgaaagaatcttcagaacttgaggattctgaacgttcaggtcttgaggaaagctcaccatataacgatcgccctggcaaaggcatcaagagctcatggcggggagaagaaggtgtttttggtgcccgtccttttcctatcgagtctgtggcagaagctccagagcacgaacaggcacctcggtccagcccaagcagtagcaaagttcgaggccatctagttgatatcggtctggaggattctttacgggccgattttgacgatgatcagacgttatccagtcccggtgctcacgacccacctgttcagcgattccgagaacgagaattactgaaggagcactctggtaccagccagcatggatttactggcgaacaggctgagattttatcgcaagacgttccacggccgccgagctcggcaagttcatttccaacaacggtttcaccgctagcctcagaaaacacagtgcacgacgccttttggggccatttatttttgatatctctcgcgggattatttgcttctgcatttctcgtatatcttcacacatctaccccgtctggagacaaatcaagatggggggatacaatctacatgactgtccatcgatcgttcttcctcctcgggatatatactattgtatcggttcttgtgtcccttctttggttggcgttactacgatcctatgtgcgacttctagtccatgtgattctagtcgccgttcccactatattatactctttctccttgtatcctttcatctcaagtttcaagggaccgtggcatggcaccagtatccaagacaaggcgatgaggtggggctctgctgtcccgtttctcatagctaccatgtggatctacaatgttgtgcgtggccgtcagtctatagggaaggccataggcattcttgaatttgcctgtcgaatcttggccgccaatcccgagctgcttgctcttggtctgggtgccctaatctgcgttgtctcctggacgtggatctggatgctgatgttcactcgtgtcttcttgggcggccaccttgttagctcaagatcgttcatcattgacgtgggtagctggtggctcgctatctatttcgttgtagtttatctatggtcggtcggcgtcatcgcaggcatccagcgtgctgtcaccgctgcaacagtgagccagtggtatttccaccgtttggccacacccgcgcccacctcgaggcagattgttcaggcagccatcgttcatgccgccacaactctctttggcacgatctctttgtccagactactcgggctactggttcgacttcctcttctattgctaccagatcgcatctgctcgttgcttagcctcttcgcctattcactcgttcccaccccaattacttacttgaccaatcctctttctctcacctatgcagcgattcattcgcaacctcttgccgcctcctcccggggtttgagccaaatgactgtccttgccccatcggcggcctccacgtctttaaacccccgttcatattctcggtctcccaggagctctgggtctttactctcatacaggctgtctaaattgatcctctacgctgcccgcttcataatgtccttggctttagggttcggcggttgggtgactactgctcgaagcctgacaatgtcggcatccggtggtaccattcgtggcagtctttatgcctacgtcgtcggccttattgctggaacaattggttggaccacactgggcgcaatggaaggtgtgatcgcagatattgtagacgcagcggttatttgctgggcaagcgaggtcggtatttacggcagagaagcccggtattgccgcgaggctggttggctctttggtgactcgcagcctcacctagggcatgaatatcaagaggtctaggtcgttttttttttgtcgttctttcttcatcttataagtccctaacgcattctctctcatggttatgacatttgcaacaatcctttgtaccattgagcgttttaaaacattcctatatactttagcgaaattcctaactctcaagtagaagacttgacaggcaaatacattctacatttatatctcggttgtacgcgattccaaagcagctagctctctgggaaaataatttattcttttgcatgtcccatggtatattcgaattgcaaatagctgcatgaaaatccagggctcgtggtatcatgagaaaatataaagagaaaggaaatgacttgtgcgggaaaaaagacaaggcctcccctgagacgccatatgaagcatattccgagcgacgaggagaacaaaggagaaattatgaaacatgaatcagagaccaagacgtccattccactctactcgttctttcgagcaccattctttcagcagggaccagccaaaccgaacaacttcgatgggcggggtagtgccaccaaatggtaggaaatagcctccagcataatctccagccctgagggatgatcggcctctttccgaataatttcgagatcgctgcgaccagatcgtggggaactcacgcccaaggacatcttcagaaagaccccgggtgccctctacccatagtctctgggaatccctgtaggactcaggaagacgagccttcagttctgaaaattccttcctgcttttcctgttctcgtccgacagggctgcgtttccatcactcccaggcgtaggaaacggggtgtgctccccaggaattgggcttacagcgaggcgttcaagatcgagagtgtgaatggcagtccaggacacagccccaaggagcaaacagagactgtttaatgccggatatggtacactgttctttctgaccacacgccagtatggcacaatagacagccatgtcgaggaatcgccgacctggcgtgacgaagctttggcctggtcgttcgctacaaatgccataataaaggacaacaacgcttcgattgcagtcacaacggctagcttttcgtcagtgaccgaggttccggttttggaggtatgccgctctgcggcatgtttcaattcacgcccgatgctagcaaacctttgccactcatcccaccataactgccgctcattgcgcgtacgaccatctccctgtgtcggagaaactttcagggttgacccgggatcaacggattgacgtttgttggcgggattgggaggattcttgccatcggtcccatcggtctgtccgagatcatttcgacgagaggcaggaggttttacgtctttcagcggcgtgatggaagctggtttggttttgtcatgggtgattgaatgagaggtcaggtgttgctgaggaaccggcgttcgaggcttttcaggtaaggtttttggctcccttgaatgaccagcttcaggaccaagagcttcctcagtctcatgcttcttgcccttcggatccgcgaatgtgtgcccacgagacgaaccagtatctcctcccctcttcctgggatgagagatatcatcacgatctgtatcctggctaaccggtgaatcggacagatgggctttccttttaccagagaatttaagcagagcttcgacacgctttcggtttgctcttccgtaccgcagtttggtaagaagctgcatcttttgtgggtcggcacgagtgtggtctcttgtatgttcgtggatattggattctttggcaggcaatccttttcctgcccgactattgcgagacggtgaacggtcctcaaggcgagccaactccctttcgatgtctggggggagagtaggagacagcaagcgcggaagtctagggccacccgatgtcggtgggagagtaggcgaaagaagtgtggggagcttgggggagtgtaatttggcagggcagggctctcggtgtgtctctttctcgggagagagccgcagtttctttatatgatgtgcctcggacttcttagttgctgaggggttatggtattcaggttccggcccagacggccgtttctggcccgctctttcgggagagagacgcgtatgtgactttggcggcattcgaggcaatttagtcttatcgttattcttgaggggttctgaagatatcatctgtcgtctttcttcggacttggcggagcttgatacgcctcggctacccgcttcgaggccaacgggggatgcgacagggccactggtcttctgagtcttgtagtcctttaggctaatcttctttttggccactgtttcccttgaactttctccaacgcttggggctgttgatcgatcggccatcatgcgccctgtttcgtctgaccagtccccgaccgctagaagcaatgagtctgtgtcgtggtgtgtcaagaaggtcatatattgtagttgctgctcctccaagctgaagggtctgtcatgccctacagcccaattgttggcgggccggttccccgggttaaagggcgttttggtcggaaatgtgagtaaatatggaacgggggggagaacgtcgtccgagaggtgctgtaatcgttggtcaagaacttcacggtccgacgtggaggaactcgcagctcggaggtttgtagtggtttgggaatggcgtttctcgttcaccgacatcgcagtgcgcagggtttcgcgaattgttcttccacaagagatgctaggatgatacgcgcttcaagcacaatttgggccgaagtctatcaccgagtcctgttgctcgagtcggtatggcgagttgcctggtgatagtcaacgcattgagttaagtgaaggatagtggatgtacaagatccggccttgttcaggtgccgaataatcagggcatcctatcactatcgcgcgtggggggggtgttcccataaccctgggatttcgaagccacgcaattgggagggagaactaaacacagggtaacaaagaaaaagtgggatgtgtcacaatgagagggtgacctctttccattaaggagcgagagatgggaaatgtccccggatagaatgaaagagaccgatgaattggagaaggttacgttaggtcggttacggtgttgcttatcggcttatcgttaccgtataatttcattacatacagccctggaggtacttgcacatctattgatgaggatatataaagtctcgaacacttatgtacatgcacatgcacatgcacatatgtatatgtaggatgtatgtgccttgtcggcctggtaggatgtagggaatgaatatgtagaagttactccatgccagggttgtgttgttgaagcctcaccgttcaggaacggtcatcatcggcaaacttctcacgccagaatgcacggtaatgtttctgctcgccaaccttggagatctcatcaacctcttgaggagtcagtttgaatgtaaacgtgcgcaaatagccgttcaggcgggattctttgccactagtggtaatagccacacagccacggtcaattatccagcgcaacaagatctcggactggctgactgcatacttggtggccaaggaagagagcagagggtccaatggaccaccctgggcccgggtggcaggggtgagacccccataactaacagtcttgatacccttactctcttggtagggaacaagattgccacgttgaaggtaaggatggaactcaatctgattcacagatggtaccactttagcggtctcgagaatggtctccaagtcgctttgtaagaaattggacacgccaatggaccgggctttcccagatgcctttacttgctccattgcggcccaggcagcttgaagtacatccttggactttgcgaagtacggagcatggatcaagtacctgctccattgattagaagcagtccccgggcgagccattactcacatcacgttggagttgacttacagatccacatagtcaagttggagcttcttgagactggtatcaatagcctgaggaatatcggcaatattggtgatgaccttagtcgtcacggtgagtttatctcgagataccccgctttctttaattgcctgccccagttcctcctcggtttggtagacctcagctccatcgaggtggtagtatcctagcttcgttgccatcttgatcgattcgaccaattcatgattgataccgatgtcagcggacttcttaaaccacgcggtaccagtgccatatccaagctgtatttgttagagaatattgcccatagtatctatgaatgtggggtaatgatagataactcacgatagggaccgaggtaccgtcattgagatccaatgtaggaatagatgaaataatgtttgccatgattccaaggtgttccaaaagagtaatataggatgatgaaaggtgttgtaagggatacttgggccgtggtacctgggggaggaggggcttgtccacgctagacccgtggactgggcaatgattaataatgtcaattatgtcatttctaacctcccgggagctgcctccagagctctccatacttccagtggccactaccttcacttggatccatatccccgaattacttggtctctccctctctctatgaacttccgtctgctcgccgcatgttcaagaaattggtatatgtttccacgcagctttcggccaccgtcggttcggaaccgtttaaaccaaatggtatcacatctttcgactgccgggatctcccttgctgagttaccgaaatcaaatattttcacatctaaattaccccatgatccggctttcgatacaccggaattgtctcataaggccccaagggaaactttggggcctcgcatggtcaatggagctttgttcacatatattcgcccagagcagactgccgagccagaactactaggagtcagttcgaaagcgatgaatgacttgggattgaagccaggcgaggaacaaacgtctcaattcaaggcactagtctccgggaatgagatttggtggaacgaggaacagggtggaatctacccatgggcacagtgttatggaggtcagtacccacgttgtcatgcccgagaaacccagatgaaactaacctgctcaggctggcaattgtaagctacggaggaagctagatgtgacttacagctgacaacatgcagcggttcatgggctggacagctcggagacggggtaagctaatggattaacatgagttctcagttcactagaaatactaatgattgacaaaatagcgtgcaatcagtctcttcgaatgcaccaaccctcagacaaatacccggtatgagctgcaactgaaaggagcaggcaaaacaccctattcacgttttgcagacggcaaagctgtcctccggtcaagtatccgtgaatatgtggtttcagaaggtaagtaaagctgtatgaaacccaaggatagaccactgaaacattgctagctctatctgccctcggtataccaaccactcgggcactctcactcaccttgattcccaatgccaaggtattgcgagagcgtcttgaaccaggagcaattgttgctcgttttgctgaaacttggctaagaatcggcacctttgatctacttcgtgttcgcggagatcgtgagttgatcaggaagcttgcgacatatgttgcagaagacgtttttagcggatgggaatcccttcccgccattgtatcgctgggtgaccagcagtcttccacgcaaatcgataatcctcgtaggggtatccccggcgatcaagtacaagaacaccaggatgtacaagaaaatcgatttgctagactgtatcgagaaatcgctcgccgcaatgctaagacagtggctgcatggcaggcctacggcttcatgaatggcgtgctaaacaccgacaacacatccatttatggcttgtcactggactacggcccatttgcgtttatggacaactttgatccccactacacaccgaaccacgatgaccatatgctgcgatacgcatatcgcaaccaacccagcattatctggtggaatctggtccgacttggagagtcattaggtgagttgattggggccggaaatcaggttgacgaggaaagcttcgtcaataacggggtgacgaaggaatttgaaccggaactcatcaagcgtgcggagaaagttatcgagcgtgtgggtgaggagttcaaagcagtattcctaaacgaatacaagcgcttgatgggccaaaggctaggactaaaaacacaggccgagtcagacttccagatacttttttcggatatgctagacacactcgaagcacttgaactggacttcaaccacttcttccgccggctctcagggctgcctctatccaatctggagaccgaagaaggccgaagggaagcagcctcggtcttcttccatgctgaaggtttcggtggaattggatacactgaggctacagctagagatcgcattgcgaaatggctggatatttggcggcttcgcgtcctagaggactggggccccgcaaacgacgaggaaagacaaaaggccatgaaatcagtcaacccgaacgtaagtatctgctgaaatcttccttttgaagtccggtgcccatcgactaacctattgatagtttgtgcctcgagggtggattcttgacgaggtcatcgagcgtgtggagcgcaaaggagaccgagatattctaggccgggtcatgcatatgtctttgaatccattcaacgatgaatggggtcttcacaacgaagaggaagagcgtttctgcggggatgtccccaagtacaaaagggctatgatgtgcagttgcagctcgtaatcaagctacgagcgctataccgatctcagttctctgggaggcgagtgtatgatatatgacttttttaaggaaccagaaccgattggagctagatagcaaatgcatcggctcccacgagatagcctcggagaattaaacgtgcaaatatgagtatttgccagactccctacttcacattttatacgcgttatcataaaacccgcgaattaccaaacaacctaggtgggagtcatcaaagttagatcgtgtcaaccttgtcaggcgttgatctctaatcatacattttcaggaaaaaaagagaaattcgtttcgtgcatgcatgaaaaatgtcgtccaatcccatggaaactgtagaaagatgttgaccaaaagagcaatgcaagcaatgggcaccctagttagggcaagcggactgaacgtggccgggctgcttgcacttgtagcacatgcgctcacccttggcctcagtggggcagtcgcgagagacatggccgacttcgccgcctacttacaagttagtagcatattccggcgaatgagaaaacccggaataactgacagttgtagcacttctgaccctgagtgcagtcacgggccatgtggccgaagccaccgcaggagtagcaggtctgttggcgaccaccggcaccacctggaccactgaacccaccaccgtagccgcctccagcgctgtaaccaccactgtagttaccaccctgggagcagttccgcgcgatgtggccgacctgtccgcacttgtagcactcctgggaaccaccaccgctgtagttgctgtcgcctccctgagggcattcgcgagaaagatgtccggtttggccacaacggtagcacgacttctccttggcaggttcctggcattcgcggcctttttaaaaaaatgttagtcaagtccaaatagagtccgcgatattcaattccaacttactcaagtgaccttggcctgaaattgtgattgaattgattagcaacgttctaataaccagtccatagatccaatggacgattttgaagtgagcgtaccgttgcaattgtagctattggaggactgggttagctttttgaattgacagatcaaagggaaagagaaattaccaggtagggtttcccttcttagggcagtccttggcctagaaagagcagataagcttcgagtctccttttttaaatcaagttttcaagaggaaatcgggcaaaggttgtaattacctggtgggaggcctcgccgcctataaaagaagagagttagtaaatatcagcttgcgcaatagatgtcgcaatagagccccggatccaattcgagtaccacaagctctccgaatgaatatgacgtattcacaggatttgaccaagccggtgcttatttctcccagtccaggttgcagtagaagggaaaaaagaacttacagttgaaacagccaccacgtcctgcaggagggaagtccatatttgaataaggggattgggaattttataagagggaaagtaataagtcgttaggaatgaagaagttgaagaatctgaaaaatataatattgtagtgcggggagaaatcttcccgcaaagctgaccgccctgaagagagaaagagatggacttctttttgattcaggatattcttgctcgtctgcttctttctcacttggatattctgttttctgggtattctgttcttctctggattccccccagtcctcacccgagttttctagaatggaagtcatcacggattcagagaatgcctgccctatccctttttttatccatttggaaaggtgtaatgtaatggatgagaccggagaatggaaaataacaaaagtcgaacaaagattcagggtccaacttttatatataggagaacaacccctgtcttgccagggtccccagtccaggtgggctgagtaccttgtgctaccgaacgcccgctaaacaacacgtcacagccaagttagggaatgattccgtcttcattatctgttggcatacctcgacaatatatatatatatatatatatatatatatcttgtgttaggtgaagtcgtaacactcaagtagctgtgttccggtcctttctcgaaggagaagtacccgttcatcatcaaatccgataggcacagtcacttcttgagtttccagatccacactgcccaaactgtggtaaatcggtcctaatcctggttctggttctggctcgggttccccgtccttgttcccagcgttgagctgaacaccgttctcctcgaagaatttgcggctgcccagggatgatatcgccatctctaactcccatatccgaatctcatcccctcgagagcttacagagacggctttcccgcggttggtcacctgaacagcagatacagaagaggtgtggccccaaagtcgccggcctccttggacaaacaaagattccaatgtagatacaacaaggtacatagtcaacgtgttatcggcatgagaggtcagcaaatatggatgggaataggacatagaggttggcggctgttgatgtatgatagacggtgtcccagggtcaatgggaggttgattgtcgaccgactcggttgcagagtgccgcctttttctggattgaagtggcctcaatccatattgggaatccactgtagtggccagtcgggaatcgagttgttgcccatctttgcctagacgcagttcttgtatcccctgagaccacccacagccaatgtggaagaaactatacacaatagtagcgacaatttcaaacgacgaaactctaagagatagtgtcatgggtgcaatcatgttatctgccttgagggaggcaacccggaggggctctgaggactcggcggttgcccccggttgatggctgccaggttgcagattgtacaaggtcaaatctttgtgctgagacactaccattaaatacggcgacgatagagcaattgctgttatagcagcatcactgcggccgacatgagaagactgcaagtctagctgggatgtttgaagatacaagacgaagaggctgaaatgaccattttccagaccaactgagatctcgatcttatcttggatctgacttactgccaaggcggttggagtcataggtgatgatctcgatggagttgacaaaggaactcttgcgagacaacatgctgaatctcttgtggtccaagcccggagcccgtgcgctgagtctgccgtaaagacaatcccagcacaaaacttgactagcgtaggagggcatggcggccgaggaaactctacctcggtaacccgacatagccctttggaccagttatgtctgagccgatactgccgtttccaattgccttcctgtgccaagtgcccgtggtcgaaccacgttgcgaccttgggcgaataatctgtcttggatggaagggttgtgcgtctagtatttgcaaggcggcgggcacggggccgcacccattgcgagtagtattgccttttccatatctcagagtctccaccaagaacatggaagcgatgtgataacctgaggtagcaagttagcgagacctaccgagaaggaccgacgaaaatgagagtatatatatacctttgacacacgttaagggatgatactggtagaaaagacagaatatggagcagcaactcattgctcagacgagacagacgatcaacaggcctgatgtcgttccgagtacggatccgcttttgcggtagatcggagtcccagtggtctctgcatcgtttagacatcctttctcgggctaaggaaaagaagaaaaagctttgaggagactagtagaacgaatcggagaaatcattccgcacgttcagagaaacaatagtggttaaaggtggagggacaattgtacgtggagttggccccgagccaccgaggatcttatcagcaagtgataagctcacgtgtgctcatttagcctcgacgcgtcgtcgcgtttatatctctacctgacatgacgtctacagcttgttttcttttccttttcattccgatccgtgtggttaccctcggtgctataatataaacctcacaatggaagttgtcaaggagctccacgctgctgtggcaaatgcatgtgaggaatccttcgacaatgcctataagcacatgaaatcccatattgatgcatacgtcaaagaggcaaaattaaaagaatcaatggccagccaatcacagcgacgatcagagaccagaattcgagagcttgaacatgatattacggtactccggagtgagctgcaacaatatgaagttgatccacgggatcttgaacttcccggggaatatgccaatctagagaccgaatttgacccgaaaaacctgtggggggataacctggaggaggaggatcatcgcagttttcggaagtctcggaacagagttgaggccaaatacaccgcgctttatacaaatttacagacattcatccaaacttggagtggtctcaaatctcgagttttgcagcataaaaagaagctacggcggtgggatcagcaattagagcgtggagaattctcgcttgttctcaatggtcaacccgtcaaattccgcagggtggaaagtcccaccttcgaggatgtcgacaaacactcggagacccaaggctcctcgaagaaacgcccaagagaagagtttccagatcttcctgccaaggccatcaagttgtcacaaagaaggtcccgcgcagatgatgaacatgcagatataagagttgaagatgataaccaaagagtaattcacggcttaacatcagagtcagcctccactcagtctagttctcctagacccgatatggaaccctcagaatcttctgatacaatatgtttcctacctcatgcctgcggggagcagactcggcagaggctttccccgacacttcccgacaggtgtcttgtgcacacccagcggacggtgatgagcttggagcgccctgcagttgtcaaaaaagagatcttgtcctcgagtccatctcgaggttcaatacacaacagtgaacagccagttgtaagcacgcaagatctggatgagataggggacacgatacggacaccaatcaaacggaaagcctaccgggatgtcaatgtcgcacatcactcgaaacgaattccgataggcccgcaagtatctcaacagccatctataccccaaccaggtgacagcaacatacgcaaggctacattctctgtacagggatcctccacgaaacgcctccaagatctagagcgacgcgcaataccagctctggcagaagacggcgaggacgcgacctccttaccgacgtcttcgaaaattggctccggtgtcaatatcagaccttcggaagccaagacaaatagtggatttgcacaaagacgcctggaagaccttttggaacaatcggtgccccccagatcaccacttcatttgtcgagcaaagtctccggccttgattcaccaaagccaaacgatgcaacccgcagtgatcaactaacacccaagacgttgagtcaaacggcgccaaatataaaccccgatgatgaaccatttcgggcaagacctcttcgttgtcttgggttggaacatttcaaaatcaatccggctagaaatcaagggcttgattacgcatatgatgcagttatccgaaagaagcatgaccgcaaatgcatatcaggctgcactcgcccaggatgttgtggggatcggttccgggctatggcccgccttgggggtttccccggtaaatctggagcagaacaggagaaagaagatcaggcaattctacaggaattcctgggagaagatacacaattgcttcgaaacatgagcggtgaagagcgtgaaaatctcctggtggaagcgagagccagggccctggccaaccaatatggacgacatcggcatacccatcagcgggctcaatcccctcctggcttctggcggactgagatgccagatacacaggaggaggaagacgaccttgaagctgccaagaggttggagcgtgagaaagtggaagagcgatatcgagaggctatgcgccctggggggttatggacatgggcggatgaatgatgaataagaaaaacatatttctatagcctattcaatattgatttatgactagaaacacatcatgaaaggtatccgaaaccatctgttcataggtaaatgtaagtatgaaagcgtcaacctcggcccaaggcatcttggcagacgcaagacgcgggaccacgtgccttgcaacctcccgaggtcaccctccccatctcctccgtcgctatctcaacatgcttgaagcttagagatggaaaccgttcgcaatatccagaatccaataccgccggtgctcttgcaaccatctaaatggctttctatctatgaggacttcgtgaccaagaatgccagctcggttggtcaagtcgagtcagcgctgagatctttgacttatatcatcccaggtgagttctcattcggtttgaccatgcaactgttcaataatctaacagttatcttctatcagggcgataccgcgaatcagatataccctcagaatgtggtcagtgtaacattgtacttgcctttgggcacgcctgctgatttcccctgcagtacactccggtgtccagttgttatcgttataccatgactctcttgtttcgcgagttgttgataggcttccgtccactgtcccccgaccgccgcccactccccactcccggtataccaaatactggacctctcgctcctcgctatatcgccaggtagcgcttgcgctacaaatgcttcagtataccgagcttctctgggagatggcagcgcggcggcgtggccagaaaacccgttggcgcgtggtcatctttattgaatttgcgaaggcagtctgccgattgcttcttctgcgattgacgaactccagacctctcgtcagtcctccacttccagagcgcgagatagatccaagaaccacagaagaggaggaaccacagagtggttggaatggaatggacactccggtcagcgagcggtcttcagacttgagttggaccatgcctcgcacgggactttcccttccgtccctgcccgacgtaaacgatgtgtcgaactatctcatctccaaagtgcttacggcagatgacattaaacccccgaaggcactcctccaccgggcgacaggacaagggcaactggctgaagtgctatacatccttcggcctgtcgtctatgcattggcgatgcaaaagtggagtggtgataagcgaaactggcggccatggcttattggattcggaatggagtatggctgccgccaactcgcaaagcgggacttccgtgaacgggtcgctggcggtcttcgggggtctacagggcttgagcgagaggaactgaagaagcgtggatggtcaatgggctggtggatgatgcgaggcgcattttatgagaacgtcaccaagtaagaaccctgcctctggtctgtctctggttttctgtttaaatactgacattgtgaaacaggtcctggctacacagtttaactggaaagatgaaaggcaagccattgttagacttggtaagcagtgttgtggaggactatgaatacctttgggacaacttctacttctcgactgctacgctgtgaatttccacagatgagctcagattttactcacccatgatacccattatttctatgtacaagtcactttttatgctattccatttttcatttgttctcactcttgctgtgcttcgcgcaaggggtatcattagtgttttattaagtttcatgtctaatcacatttcacggagcgttcacattcagagaacctcagtttgtctgtgcccataccaatctcgtaatccaaccttgcccatgcttttcccgggggctgatgatagtaagaactcatctaaccgagatgccccttcctcctcttcgtcgggccagtcgactcttgctcctcctttcatttcaagcatctcctttgcagtgccccagctaaatcgacactcattgccccatccaaacacagggtccatgttgcgccgaagccatccgacacacttggagtccgagggataaccacttccccaagtctcggaggttggtgtcagtggctgctcagcccggagcacggcctcgtacatgacttccagtgcaacgtcccgcgtcaccttggctgccacactggcggcgctgacacatgggtacaaggaatcggctttctttgccactgtgattttgagggatgggaagattcgctccaatttttgctggtatgtagcggggttcccaatcgtgtcaatgtatacttctcgcacatccactccacggtcttcaaccacccctcgaatgatctccaccgtggcatccatggcctgggcattcagattgtacactgcggtaggtgatctcatcatgccagaagagatatcgcgcgccgaaagtactttgaccgcatatccgcaggactcgaacaatgaatctcccggtgtattcaatagatgcatcaagttcgctcgcacggcgggtgtaaggactttgctgtcgtcaaagctgtgtttctcggtcaaaagcgagtggtgcagatcaagagggagatagaaggcaccgtaaaccattggccctaggactggaccacggccggcttcatcgacacccaagacacatggtgtactctccagtgtatcacgaattgtggatgaggtcccttgaggcgtgattgcgttggggcatggggtgtagtacgcgtaggactcgccggagagaagtggttctgaaatcacactcggaggaataaaggtggacgattcctttagtagattgacggggggagtatcattaggcataataggcatataggacattgaaagaaagaacaaaagaaagtcttgaaggtacaaagaaatgcaaaagatctcccgagtgcacaactgcacaacgcgtcgactgttcgggattagcgggggcgcgtgttgctcttcccgcctaaattccgcattcctcccctccaccttgtctctcttttgactgattttcttgattctctctctatcttttgatttcaattccatcctagtgctcaacttccaatatggcacgagggcccggaaaggcccgcgacttcgactactccaatgtgggaactaagggaaggtgagtcgatatgttttagtcaattccacttgtactaggaccgctaaactgatccaatacgtctaggcgcactggcatatcgctgaaggaaggtcgacgcgatgaacatggaatggaagaagttgacggcctcttctcgtctcctgaaaagtcgcctgtgcagctcaatgggtttgaagaggaggaaaacaactcttcggctgggtccgagggcatgtcgatggacgaaggtgggctgattcagtgtcgccttatattgccgactcattgcgtgctgatgcacattctataggcaatgcgccagatcccatggactttctcaagggcacaaatggctcacgtacctctttcccccccccgcctgctgcgcggtcgccgatgaagactggcctcactgggtctccgcggaggacaccagcgttgcaatcaactccagacccgcaggatattcttgagtcgtctagtccgtctgacggcaaaggtttcgcgggcgcaccggaagaattacgccaagatccatctcctctttccactcgctcggtgaacgtaggacgctcaaaccagaggaatggcacacggcgaaaacccacgacaaaagcacagctagcgtcagaatccgagcccgcagtcatacatgacttttcagacttttccgacgccgacggcgacggcgacgagaacgcgagtgcattcgccacggtacaacaagattttggtggcagtctggatgtagaatctgattcagttgctgcagagaaggtacccgattctcccgggcaagaccaacacgaacatgacggcaattcatccacaactgacacgactccgcctcgggaagaacccgttctggcctccaagtcaacaaagaaggtggcgccaaatagtaccaaggcaggcaagaaccaggcaaaaccccctgcgccgcgcggacgtccaaagtctgaacgtcgtaacgtcgaagaagatgccgaccccaggccaaccaaaaagcgaaataccaccaaagcatctccaccggtgcgtgaacctttggaaccggaattggatcgggtggttgaggattacgccaaccgcacaggacctttgaagggccgaagtttgtatatcctcaaacgtgaaatccccaccgacaatagtgcaactcacactcgatctgggcgggtttcggtccgaccactagcatactggcgcaacgaacggtgcgtcttcggtgacggggaggcagccgagggacatcgataccctctttcaaccatcaaagaggtcattcgcaccgaggagcaagagcccgaaaagaagaagaagaaggggaaacgctcaacgtcccacaagtctaagtctaagaaacgaaaggatgactcttcggacgaagatgaggatgttgatctctgggagaaggaaggtggtgttcttcatggctacacactcaaatgggacgggaaaacacagacgagttcaaaggaggaggaagtactaggtatgaaccccagccccttcatatttggttcctttactaagtcgatcttgatacagacattgcgtatgctccctctggaatcgaaaccagagaagtcaaagactcaaccttccgatttgcgaagctgcttagctcgtctttcatcgggtctggcgttgtggagctcccacctgacggagtcaagaaacccaagaactccaagaaaatgcatatggtcttttatgtctgtcacgggcgtgttcaagtggatatctcaggtgtccagttcagtgccggaaagggttgtgttttccaagttccccgtggtgagtctcatgttcatggcttcttgattcgtatcaattctgacgccatgatcccatctccaggtaattattatagctttgcaaacacccaccaaaaggaggctcgacttttcttcacgcaaggctgtgtccccgatgagaatgagaacgagaacgaagacgaaacaccgcaaatgtcccaggatgtcggccctgagagcgaatttgaagccgacactcccaccgctcctgttcatgtccctgcgaagaaagccaagggtcgccccaagggcaagcagaagaagattggcaaatgatctctccatttactctgcccccacttctgttttcatgtttgtaggcatcgacaacgcgccatgatacctttcttctacgtcaatgcccccaagtctcattttatgggcatctaaatgccttttattgttattcgttcttcagcgatttgttttcatacgattaccagggaatttggcgtttttttgcctgtttctccagttaattatgcaatatctattggtgataattggtgatggaagagcaaccgagggaagctgggaatcagaacctcatgtattcgaaactatcgaaatgtattcgttcaaagtacacatactcagtgtattaaatctcctccattaggtcatctaggtcgtcatctagacccagcggggggaattctccaacctcgaccttctcgggcttcacgaagacgcccctgttgcctaagcactcgaagtagcgctgtccgcccacactaccgtcattcttccccatcggctcgtcaagctcaatcccgacccagatcggctggagatctgccggaagctttgcatcctgttgcagctcgcgacccgggccggtaataggaatagtcggaacaggtccaatgaagcggatcgtgccacgtcgaatatgcggcggagatgaaggcagaacgatagctcgtctagcaacagtgattcctgccaatatattattagattaatgaaagaaaaataaaaataaattgcattgacacttgaaattttttgtttcaacgaacctctcgtttgaatctcggtccggtctttctcaacttgatgtcgcaaagcctcttcgggcgatagagcgttagggtcaaaccgacccagcttctggttcttcttccaagccaacacagagtccgaacgggcctcgtatgtctcagttggcagcacatatttctcgactgatgataagtcggtaaagttagcccgcatggtttgcgggcggttgtcattgacctagtgaggggataaattagaatatgcccagaattcgtagcatatccattgccctgacaactcggatcaaacgacatgccgttttgggcccggtaaagcagccagaacagggtcaaatgaacagcaagacatagaaagaaaagagaacccacctcgatctccgaccccttgaccaacccccaatccccaatcaggcggtcgtccccatcggcccattggtcaggtcgaccgggaactttcacccgcaggcgctggcatcctggtgggattcccgtcatagtctctaactttgtcttaacctgcatcaccgtccaagttggggtgatgcggcgttcagtcaggaatcgaggctccgaatttccaggtttggctaaagccgcgttggtgatgatgacggagatatccatcggggtaggctggaatgccatattttctttgtatgacttgacttgtctgttcgtgtttctaggaagaaatgttagactgggctgtggattaatgcaaattctttgatggtagggtgaggcattcaaagaaaacaataatcgaaatcagacagctagattcaagatcctgtaatccttaagggtaaaaaaactaaacaaggaagactatgcatactattgcatgctgaatcgctgatatcaaattcccctgaggggcataagaagctaccggtacttgccagggcaactttgtggccgttggaaggaacacaacatattctagacgaaaaggacagtccttgaaccgggtaggtagtacttacagttgatcttgtgctcccctgtggttgacaggaaaaagaatatcgcccaatctcgaagaagcgattattagtaagcggtctccgccaggaacaggcaccgcttgacgctacacgcagttgagaatggaatcgacaaatgatatgtgagatgtaaagaggacaagatgaaactaagagccacctatttggtgcaggttatgtagataaacaattgcctaaacgggatgtcaaaacgatgtcaaagtaagtcaaccttctgtaagaaattgatataaaaacaagccacagctttgtagctgatgaagcttaactacttacgatatatatgaatactatttgtgtttaagtagtactggcattagaacactggggagccacaaattactacatagactaccgcgtgttaggaatacatatctagtcattcccatagaacaaatcaagtctaaccctatcatggaagccaggcatatcaaatataggctataatctaccatattgtgcaatatatcctatactatgccatagtagcttgcattctcatcagcgttcatacttcacgactgaccctttttatacaactctacaacaattggtcattttccaattaaaaaatagtcaagacagccaaacttgacatgattcaagcttgatactttatgctttttggaaccttataaaaaattcaacatcgcgaatatgatgtagatattatgcccgttacaaatcgcgagccacgtgatatccattctcgcttgacttttcaactctgcagcagctcccaccttattcacgacgagagcaacatggcgtcccaacaaacaggcgaagcgtatgagcagcaaaatgtccatgaggtgtaccaagagatcgctcagcatttctctgccacccgctacaaggtgtgtttcaagcgactggctatcaccaccttagaaagttccaactaatcacaattctagccatggcctatagtcgagcgatttctcacaagcctagaaccaggtgcagtgggtttagatgtagggtgtggtaatggcaaaaacttgatggtcaatcgagacgttttcatcattgcctcagataggtatgttctgatatgaattggattttctataggctacttcatttccctaggatatcatccaacttgtccattggatcccttgagcttgatctgggctaacccggtggcagatctgagaacttggctcggattgccctgcaacatcagccgcattcgaccgtggtggccgatatccttgaccttccacaccgggatgcaagctttgactt
